United States Patent Application Publication US 2018/0216167 A1 - sequence listing, part 2

SEQ ID NO: 1 - DNA, 4769156 bp, Stenotrophomonas maltophilia D457 (residues 1,589,720-3,179,438 of 4,769,156)
caggttcacgctcagtgcggtgcccagcatctcgcgcagggtgtcgatcacatcgctgatgcgtaccgcgtggtcatgcacgtcgcgcacgtagagcttcacttcatcgggaatcaggtcaccctggtagcggcgcagctgcgccagcacatcctgcagcggtgccaccgccatccgcatcttgttcagttcgcgcttgagctcgtaaagccgtaccaccgtgctgcgcttgtagctgtcggcaaagatgtccttttccagcaggtccagggtgtcgcggaagcggtgcacgatcggcaggtagttgtcgaccacgaagtcggtcaccgcgtacaggcagtacgacgggcccatcttcagcagctgcggttcacgctcgacccgtgcacgcaccggggcgtaggacagcgaggcgccgtggcgcaccgtcaccaggaaacgcgggccgaggaaggcgtgggtttcgccgtactggatgcgttcgtccaccatctgcgcggtggtcaccaccacgaacagcgaattgccgtaggtctcgaccttgggccgctggtgcgcattgcgcgcgtcctcgatggccaggtcgtgcaggcagaactcttcctgcagtttcagcagcacatcgtcgttggggtcgtacaggccgacccagacgaagccgttgccactggcaatgacatcgctgatggcatccaggctgatgtcgtggcgtttgccgtcgtcatcgtagtggacgcagttgatgacgcaggcggggttggccgaggcaggggcggaagcggaggcgggcaatgacatgcccgccatcgtgcgtcagtgccgtgtttcggacaagtgaggacggcgccccagtacccatgccagcgcgacgtggacgggcagcagaagcacgatccactgcacgttgtactgcgcctgcaggctcagccagtgcagcaccagcgccgccacggcctgcaccgccagcagccacagcacgaccctgaacatgcggcccggcgcgcgccggcgcagcagcgcgatcgcgcctggcagcaacagcacggccagtggcgaaagcagcagcaggttgcggttggcccaggcggcgtagtgggtgctgaagccccacaggaacaccagcaggctgccggcgatggcacacagcagccagaacggcagggccagcccggcaagcaggcgcggccggctgcgcagcgccagtatgccggcggcgatcaccaggccacacagcagccacggccaccagcggcgcgcgaactccttcggctccgggtcgatgcggtgcggcagcagttcctgttcggactgcaccagcggccggccgtcgctgttgcgcgcctggcgcagcgcgtcggccaggcgcatcggcacgaaggcttcctgccagcgcgacagcggctggtcggcgaacggcccgaggccgacatcgaagcccagccacatccacggtgccggcgaggccaggcgcaccgactcgctgcgataggtgttgccgcgcgaacgccccgacagctgcgactgcaggccgccatccagcgccttgtccaccgtgtcgcgcaccatcgtggcgcaattggcggtgtagtagtcgtagtggtagcgcgcgttttccggcttggcgcgctcggccaggtcagcggccagggcgcgtgcctggtcggggcgcaggtccagccactgcacgctggcgccgcggccggtctcgtcgtagtacgacaggtcctgctgcagcggcagcgccaccaagtaatacatcatgtcgccgcgcacgaagcggctgatgaaatcgtcctcggacggatcgaagtagccgaagttgtacgaggtcgcttcgccgctgagcggatcgatcacgacgatggcgtcgtggccgaagcgctcgaagaacaccgtgcccggctgcatggtcaccaccccgatgcgcggggcgggagcctcggcgctggtggcgggtgcagcaggttcgggtgccgccggctgcgcgaaggcggccagcggcagggccgtggccagcacgcacagtgccagccacagcctcaggcgcagtgccaggagggcgccgcgcttcaagcgtcgtcctgcgcgtccggcggcagcacggtcacgtggaaggcctggacccggcgcgcatcggcgcgggccacgcggaacatgaagcggtccagcgccagctcgtcaccgacttccggcaggtggcccacggcctcggtgaccaggccaccgatggtgtcgtagtcctcgtcggagaaggtagcgccgaagcgttcgttgaagtcgccgatcggggtcagcgcgtcgaccacgtactggccgtcggactggatggcgatctgcgccgacggatcctcggcctcgtcatgctcgtcgtcgatctcgccgacgatctgttccagcacgtcctcgatggtgaccaggccggcgacaccgccgtactcgtcgaccacgatggccatgtggttgcgtgacaggcggaattccttcagcagcacgttgagcttcttcgcctccgggatcagcactgccgggcgcagcagctcgcgcacgttggccgggccgttgtcggcgaccacgccgcgcagcaggtccttggccagcaggatgccaaggatgtcgtccttgttctcgccgtgcaccgggaagcgcgaatggccggattcgaccacctgcttcatcagttccaggaagggcgcttcgaccggcagcgaaaccatctgcgagcgcgagatcatcacgtcgcccacggtcaactcggccaccgaaatggcgccttccatcatcttcagggtatcggcggcgatcaggccctcttcctgcgcggtgtgcaggacagcgaccagctcgtcgcgggtatggggttcgccggagaaggcggaggtcaggcgttcaagccagccgcgcttcttttcactgggctcctgtgcggagctactactgtcgtcttctgacatctctggaaaaagggcacccggcaagccgggcgttggcccaagtctagcaggatgtggcggcctgtcagtgaccgtcgctgcccggtccggtgatcggcggcggggccagttcaggccgggcgggggcttcttcctcgggcaggtccaggctgtaggtgcagccggccagggttttgccgggatgggaggccacggtggagacgctgaggatgatcgactcgatccgggcctcgccggtcttcggatcggtcacgtcgcggctgaccagctcgcggccggccatgaacttgccgtcctggtcgtagccggtctccagccccagctgcctggccagcggccgcggatcggcctggtcgaggatcgccatgacgctggacccggccacggcgacccgttcggtgcgggcgccgaacacgctgatcggctgggccagccggtactcgctcatgaactggttgccctgcggcagcggctgcaggccgtgggcgacggctttcagcggatcagccagcaggggcgccaacgcggcctgctcggccacgccctggcggcattcaatcagggccggcaggtccagggcagcggccggggcggacacggcgagcagcaggggcagggcaatacgcagcacgggcacgggatccgcaacggaaggcaggccggtgatcgtaccggtcccggccagccatcgcgagcgccccaaggcaatcaaggcggatgcctgcgcgtggtcgctgggtaccagcgcagcctgaccgggtagcccagttgcacttgcaagtggtcgcgcacggccgccgccgtcgcgcggttggctggggtatcccgcagctcaacctccagttccccggtcgtgacatccaggctatagccgaacaggtcgggcagctgggccagcagccagtcccgctgtgcgtgcaggcggcgctgcatctccgcttcggtcatcgcggcgccggtgatgtagcgcacgcgttgcgggccatccgcccctggatgtgtctcatcggccgcgggtgctgggccagtcagtcgaacgacgacgttccaacctgccgcgttgtccacccagattccggcgaggcgtgccgcgtggcgcgctttcaaacgttccatcaatgcgtgctgctgcgcctcggcgaccgcctgacgcgccgtctgttggctgacgtcaaagaacgcctgcacctcggcgaccttggcggcaatgtcggcggcgctgtcgctggccgggaacggcgacggtcgttcccggccggggtcgatgcccggggcagtggtcacctgcagaagagcggcgatgagtgcgggcagcagcgcgatgggcgcgtcctccgtgaagatcccggtgtgcgtgggcctcagcgctcgccggcgtaggggtcggcgatgccgagctcggccaggatctcgcgctccagctgttccatggcgtcggcttccttgtcgtcctcgtggtcccagccgagcaggtgcagcacgccgtgcacggtcaggtgtgcgtagtgggcgttgagcgccttgccctgttcatcggcctcgcgggccaccaccggtgcgcagatcaccaggtcgcccagcagcggaaacttcacgcccttgggcagcccttcgggcacttcggccgggaagctgagcacgttggtcgcgtaatccttgccgcgataatggcggttcagtgactgcccttccttggcatcgaccacgcggatggccaggtcggcttcgcggatgcggcctttcagcgcagcagccacccacttgcggaagctgaccgccgccggcagaccggtgcgcggcagggcataactgacggcgacgtccagtcgcacgggaccacgggtcatggagttgctccaggttggatctgatgcaggtcacggcgatcgtaggcgctgacgatgcgcgccaccagcgggtggcggaccacgtcgcgcgactcgaagaaggtgaagctgacgccctcgacctcgcgcagcacgtcgatggcatcgcgcaggccggacttcacgtgcttggggagatcggtctgggtcaggtcgccggtgaccacggcggtggaaccgtagccgaggcgggtcaggaacatcttcatctgctcgatggtggtgttctgtgcttcgtccaggatcacgaaggcatcgttgagcgtgcggccacgcatgtaggccagcggcgcgatttcgatgacgttcttttccagcagcttgaccaccttctccacgcccatcatctcgtagagggcgtcgtacagcggtcgcaggtaggggtcgaccttctggctcaggtcaccgggcaggaagcccagcttctcgccggcctccaccgccgggcgcaccaggatcaggcgctgcacccgtgattcgttcagcgcttcgaccgcgctggccacggcaaggaaggtcttgccggtgccggccgggccgatgccgaagttgatgtcatgcgtggcgatctggtgcaggtagcggccctggttggcaccgcgaccgcgcaccgtgccgcgcttgaccttgatcgccacctcctgcgcttcgtaggagcgttcggcgatctgctcgacgttggcctgcgccaggcgcaggtggatggcgtggttgtcgaaggtggtttcgccggcttcggcgtacagcgcttcaaccagcttctgcgcctcgacgatggcttcgttgggcccgctgatgcggaacacgaaaccgcggttggcgatctccacgccgagcttcagctcgatctggcgcaggtgcccatcgaaggggccgcacaggttggccagccgctcggtgtcttccggcgacagggtgaagtctcgatgttcgatgcttttcattgccttgggtggggcggaagccttccaccgcagtgtattcagggaggacaagggtagcgcgcgcagcgggcgcgcggccagcacggggtcgatacatgcttttccacacccggtgtggacgggggctgcggaaacctgtggatagacctctacagtgcttgtgccacaagcgtcatgagggggtggtgaaaaaatcgtcacggacccgggcgtgccggcacccgcaggacgggcggaccgggagggagggcacgtcgcagcgcgtgccgagaacttcccgggcgcgccggcgttcttcgtgatcgcagcgcaggttccgctgccaggcgagcaacaggatcccgtgttgccggttttccacaccggttgtggaatgatgccgaatcaacctgtggataggtggcgaggagccttgcagccaaaggctcgccaacgcgtggtgaaaaaaccgtcagggctgatcggaatcattgagggtgcacggggcggatggcaccgtggcgccgtcgcaggaggggatggcatgggcatcggcaatgggatgcgtggaatcggattggtgggtatcggcctgctggccgggtgtgggcaggcgccgcctgcagcgctcggcacgctggagtgggaccggatcacggtgccggcgccggcggccgaagtgatcgccacggtggaggtacgcgaggggcagcaggtcaaggccggagcagtgctgatgcagctcgaccccgcccgcggcgacgcgcagttcgccgcggcgcaggccgacacggtgcgcgcgcaggcccagttggaagaactgaagatcggcccgcgccaggaacagatcgcgcaggcccaggcgcagctggccgcgttgcgcgcgcagtctgctgaagccacggcctactaccgtcgggtgcaaccgctggcacgccagcgcctgatcgccgccgccgagctggaccgtgcacgggcggctgccggcagtgccgaggccagcgtgcgggccgccgagcaggcctggctggaactggtgcacggcagccgcgcgcaggacatcgcccagggccaggcggccgccgatgccgcgcaggcgcagcaggtggtgcagggcgtcaacctgcagaagctgcagctgcgcgcgccgcgcgatggtgttgtcgatgccctgccttaccggcagggtgaccaggcgccgatcggggcgccactggcggtgatgctggtcggcgagcgcccctatgcacgcgtctacctgccgcagccgctgcgcctgcaggtcaaggtcgggcaggctgcgcaggtgcagctggaagacggcagcaccgtgctgaaggggcacgtgcgctcaatccgcagcgagccctcgttcaccccgtactacgcactgaccggtgatgacgtcgagcgcctgagctatctggccgagatcgaagtggacacggccaccgacatgcagaagcttccggccggactgccggtgcaggtgcgcttctgaacaccggcgacgacatcgcggtgcatgcgcagggcttgacccgccgcttcggcgatcttctggccgtggacaatgtcgacctgactgtgccgcgcgggcaggtgtacggcttcctggggccgaatggatccggaaagtcgaccaccatccgcatgctgtgcggcctgctggaaccgagcgctgggcagatccaggtgctggggctggcggttcccgagcaggccgaagcactgcgccggcgcatcggctacatgacccagcgcttctcgttgtatgaggacctgtcggtgcgcgagaacctggaattcctcgccgccatccaggatctgccacgcgcgcaggcccggcagcgggtcgacgagctgctgcagcagtaccgtctgctggaccggcagccgcagctggccggaaccctcagcggtggccagaagcagcgcctcgccctggccggcgccgtcgtgcacgcgcccgagctgctgttcctggacgagccgaccagcgcggtcgatccggaatcgcgccgtgatttctgggaagccctgtttgaacttgccgacgccggtaccaccgtgctggtgtcgacccactacatggacgaggccgagcgctgccaccggctggcaatcctggaccgtggtgcgctggtcgccgatggcacgccggctgagctgtgcgcacggctggacggccgcacgttgcaggtcacgtcgtcgcagccgcggcaggccagccgcgcactgtctgagctgcccggtgtgctgagcgtggcgcagatcggcacccagctgcgcgtgctgtgcaatgagggcgcagcggacgtcgcagtgctggcccgtgcacttgccaacgctgacccgcaggcccgcatccagacggtggcgccgaacctggaagatgtgttcgtggccgccacccgtgggcgcggccgggagccggcggcatgaacctgcgccggctgtgggcgatcatgctcaaggagctgcggcagctgcgccgcgaccgcatcacgctggcgatgatcgttggcattccggtgatgcagctgttgctgttcggctatgcgatcaacctcaacctgcgtcatctcgatgcgggtgtcgccgatcaggccaacagcgccgcttcgcgcgcgctggtgcaggacatggtggccaccggcgtgatcacgccgcgcagcgaagcctacacgcctgcccagctgatgcaggcgctgcgccgtggcgagatcagtgtcggcatcgtggtgccggccgacttcgagcgtcgccgcttcgatggacgcgaggcggtgcaggtgctggtcgatggcagcgacaccgtggtgcagagcgcggcgatccagctggcgcaggtgccgctggacacgcgcccgaccagcaacacccgtcccctgcgcgaaggcagcatcgccagtggtccggtcagcgtgaccagcttctacaacccgcagcggcgctcggcggtgaacatcgtaccgggcctgatcggggtgatcctgaccatgaccctggtgatgttcacggcggtagcggtggtgcgcgaacgcgagcgcggcaacatagaactgctgatcgccacgccggtgtcgcgcagcgagctgatggtcggcaaggtgctgccctatgcggccatcggcctgctgcagaccacgctggtgctggtgctgggcacctggctgttccaggtacccattcgcggcagcctgctggacatctatctggccgcggtgctgctggtgctggccaacctggcgctgggcctgctgatctccacgcgtgcgcgctcgcagttccaggcgatgcagatgacgctgttcctgttcctgccgtcgatcctgctttcgggcttcatgttcccgttcgcaggcatgccgcggccggtgcagtggctggccgaggtgctgccgctgacccacttcctgcggctggtgcgcggcatcatgctgcgcggcgcctcattgtgggagctgtggcacgacgcgctggcgctgctggccttcatcgtggtgatgatgaccctggcgatcctgcgcttccgcaagcgcctggattgaaggcagggggtcggatccccgcaggggctccgaccccaatttatcgggccggcgggtcggagcccctttggggctccgacccgaagattcattccgccaccacccgcgcgcgcagcgaattggtcagcgcttcggtgatcaccacatccacgaactggccgatcaggcgcgccggcgccgggaagttcaccgaacgcatgttctcggtcttgccggtcagctcgttcgggttcttgcgcgagggcccttccaccagcacggtctgcacggtgccgaccatcttctcggaaatgccggcggcatgcgcattgatgcgctcctgcaggcgcgacaggcgcgcgtgcttctcggcatcgctgatcgtgtcctccaggtccgcggccggcgtgccggggcggcgtgaatagatgaaggagaagctgtggtcgaagccgatgtcctcgatcagcttcatggtcttctcgaaatcggcgtcggtctcgccggggaagccgacgatgaagtccgagctgatcgagatgtccgggcgcaccgcccgcagcttgcggatcttcgacttgaactccagcgcggtgtagccgcgtttcatcgctgacagcacgcggtcgctgccggcctgtaccggcaggtgcaggaagttggccagctgtggcacgtcacggaacgcatcgatcagcgaatcgctgaactccagcggatgcgaggtggtgaagcggatgcggccgacgccatcgatctcggcgatggtgcggatcagcaggccgaggtcggcgaactcaccgtcaccatagggcccgcgatacgcgttgacgttctgcccgagcaggttgatctcgcgcacgccctgtgcggccagctgcgccacctccaccaccacgtcctcgaacgggcggctgacttcggtgccgcgggtgtagggcaccacgcagaacgaacagtacttggaacagccttccatgatcgacacgaatgccgagggtccttcggcgcgcggctcgggcaggcgatcgaatttctcgatctcggggaagctgatgtcgacctgcgggcgcttctgttcgcggcgtgcgcggatcagctccggcagccggtgcagggtctgcgggccgaacaccaggtcgacgaacggcgcacgcttgatgatcgcttcgccttcctgcgaggcgacgcagccgccgacgccgatgatgacttcgcggcccttgttcttcaggcccttccacacgcccagctggctgaacaccttctcctgcgccttctcgcggatggagcaggtgttgaccaggatgacgtcggcgtcgtccgggctgtcggtcagttccaggccatcgctggcggcaagcacgtcggccatcttggccgagtcgtactcgttcatctggcaaccgtgggtcttgatgtacagcttgcctttcacctggtcgggcttgcgcggaccagcgggcagggcaacgagcggggtaccgcccggtgtggtgggcggaaagacgtctggcgtcccggtcatggcgcttaatccattcgggtggcgggaaagcgggcaattctacccgcatcccacgccagccgccgcgcccgtgcaaccgagcccatgcccagcgtggccatcaccgtagagccgagcccgtgctcggctgcctttgcaaggcggaggagcagccgagcgtgggctcggctctacaaggggccgctgcttacgccgccagctccgcatcgatctgccgcgaacggtcgaaggcggtcatcgcgctcatccgtgcgatgtaatcggccgtggccggcgcgggctgcaccaggccgaaggccgtggtccaggccagcgcattgccccacagcacgtcggcggcgctcatcgtttcgccgagcaggtaggggccctgcgccagctgggcctcgatcacctgcagcacggtctcggcgtcgttgtacggcgacatcaggcgcggcggcggctcgcggtgcatcgccttgtcgatcatcgccggctcgaaacaggcgccatagaaggccatccagcgcaggtagggcccgcgcagggcgtcgccgatcggcggtgccaggccggcctccggatacaggtcggccaggtacagatagatcgccacctgctcggtcaccagcgcaccgttgtggacgatcgccggcaccttgcccatcgggttgatggccaggtaggccggggccaggttggcgcccgccttcaggtccagcacctgcatgcggtagtcggcacccagtgcttcgagcagggccacggcgccgctcgagcgcgaacgggcggcgtggtacagggtgatctggcgtgaattcatggcattgctccttgcggtgggtggtgaactggaggccatcctggggcactattgcggacgacttctgtcctcgatccttcatgcgccataccgcccatcgactgctgcgcctgatcgccctgctgcaggcccgtcgccagtggtccggggccgagctcgccgagcgcatgggcgtggaccggcgcagcatccgccgtgacgtcgagcgcctgcgcgagctgggttatccggtccgggcctcgtccggggttggcggcggctaccagctgggggcaggggcgccggtgctgccgatgctgctggacgaggaggaggcgaccaccctggccatcgccctgcgcgcggcctcggcgaccgtcgccggcatcgacgacaccgcgcgcggcctgttgtccaagctcgatccgctggtgccgacccgtcgccgccagcaggccggcgaggtgcatgccgccaccgccaccctgtccgaccttccgtccaccgacgcacgcctgcttgggcagctggcccagcactgccggcaggcgtcacggctggccttcgaataccgcagtgcccaggaagcggtgacccagcgcgaggtcgaggcgcagcacctggtcaactacgggcggcgctggtacctgctggcctgggacctgggccggcaggactggcgcaccctgcgcgtggaccggatgggcgcggtgcgcgaatgcgccgagccgggcatgcaccgccgtacgcccgcaccgccggatgtgatggtgcggcaggcggtcagccaggccccgttcgccctgcaggccatcgtccgcctggccggcagccgcgccgagctggaaggccgcatcccgccctggtgtggtgtgctggaggacgatgggcccgaccattgcctgctgcgcatgggcgccgagagccgcggcatgatgctggcgcagatcctcagcctggaccgggtgccggtggcggtgtggaccacgccgccgggcctgcgcgatgaactggcacagcgcctggctggattggggcaggtgctggctgtgccgcccgtcacaggctgagccgcgtcgcttggcaagccccggcgaagctgggacactcgccggcatgaaggggatactggggacaacggcgatcatcatcgctgcgctgaccgctgcgccggccagcgcgggcaccctgttcaagtgccagggcgccgacggggtcaccagctatgtcagcaagcgcctggccggggcccgctgcagcgccatcagctacagccgcgacctccgcccggcaccgcgcccggtggtggccgcgccgaagccggcgccgaccaccgtggccagcatcgagcgcaacccggtggcggtggcggccagcgctgcggcgccggcggctgcgccagccgccgtacccgcgcccccggtcgcctcgcgcagcgggcgcatggtcagcggccaggtctattccttcatgaaggacggcgtgcgccactacaccagtgcgcgcccgacccaggtcgccaacctcggcccggtgcgcaccatccgctacagtttcatggagcgctgctacgcctgtggcgtcaacccgcgcgtggacttcggttcggtgcggttgaacaccaccgcgttccagaccgagatcagctcggccgcgcgcgagttcggcgtcgacgaagccgtggtgcgcgccatcatccacgccgagtcggcctacaacccgaccgcgctcagccgcgccggcgcgcagggcctgatgcagctgatgccgccaaccgcggcccgtttcggagtcagcgattcctacgatgccgggcagaacatccgcggtggcgtgcagtatcttgcgtggttgttgaagcgtttcaatggcgacctgaccttggccgcggctggctacaacgcgggcgaaggcgcggttgaccgccacggtggcgtgccgccctacagcgagacccagtactacgtgcgccgggtcgggcagctggccgagcgttaccgcaccgcattgacgcaccagtagtgccggccgctggccggcaaccttgggcaatggccggtaccgaccggccactggctggcagccccgtactcaatgttgttgcaatgcgttgtgtggcgctcgacggttccgctacactcgcccatgattcaatgcggctctggcccccaccggatccgctggcagccttaaagctacctaatcaatatcggagtgccggatggccaacgatggggtacacgatccagtcaacaccggacgtcggcgttttctttctgccaccacagccgtggtgggcgccgtcggcgtcggattcaccgctgttcctttcatcaaatcctggaaccccagtgcccgtgccaagcttgccggcgcaccggtggtggccgacatcagcgccctgcaggaaggccaacgcctgatcgtggaatggcgtggccagccgatctggatcgtcaagcggtccaaggcgatcctcgatgcactgcacgggctcgatggccgcctcaaggaccccgagtccggcgagaaggaccagcagccggactacgtgctgaagcagaaccccgagctgcgctcgatcaagccggacatttccgtgctggtcggcctgtgcacgcacctgggctgttcgccggaaatggtcgccgagatccggcctgaaccctatgacccgcagtggaagggcggctacttctgcccctgccacaagtcgcgcttcgacatgtccggccgcgtcttcaaggacgtgccggcgccgatcaacctgaaggtgcccgcgcaccattaccaggacgacaacaccatcatcatcggtgtcgatccgcagggggcagcctgatggccaatatcctcgctcgtaccgccagcggcgtggccgactgggtcaatgcccgcgcgccgggcctgatgccggtctaccgcaagcatgtcaccgagtactacgcgccgaagaacttcaacatctggtactacttcggttcgctggcgctgctggtgctggtcaaccagatcgtcaccggcatcttcctgacgatgcactacaagaccaacgccgccgaggcgttcggctccatcgaatacatcatgcgtgatgtggagtggggctggctgatccgctacatgcactccaccggggcctcgctgttcttcatcgtggtctacctgcacatgttccgcggcctgctgtacggcagttaccagaagccgcgcgagctggtgtggatcctgggcatgctgatctacctggtgctgatggccgaagccttcatgggctacgtgctgccgtggggccagatgtcgttctggggcgccaaggtgatcatttcgctgttcggcgcgataccggtgatcggcaacggcctgaccgaatggatcatgggcgactacctgcccagcgacgccacgctcaaccgcttctttgcgctgcacgtcatcgcactgccgctggtgctgctgttgctggtggtgctgcacctgggcgcgctgcacgaggtggggtcgaacaaccccgatggcgtggagatcaagaaggggcccaagggcaaccgctggtcgccgaacgccccggccgacggcattccgttccatccgtactacacgctcaaggatggcgtcggtgccggcttcctgctgatcatcgccgccttcatcatcttcttcgcccccggtttcggcggcctgttcctggagcacgacaacttcaccgaagccaaccgcctggtgaccccggaacacatcaagccggtctggtactacacgccgtactacgcgatgttgcgcgtggtgccgaacaagctgggcggcgtgctggtgatgttctcggccatcgcgatcctgttcctggtgccgtggctggacaaggcgaaggtgaaatcggtgcgctaccgcggctggatctcgaaggtgatgctgggcgtgctggcggtgtgcttcgtgtggctgggcgtgattggttccggcccgggcaccgatgtgcacgagacctacatcgggcgggtgttgaccttcctgtacttcgcgttcttcatcaccatgccgctatggacaaggttggacaggaccaagccggtaccggagagggtgaccacgcatgactgagcgctggatggtccggctggccctggcggccaccctgatgctgggcagtttcctggcctccgccgccgaaggcggcaccccgctgctgcaggccggcaacgacctcggtgaccgcgcctcgctgcagcgcggcgcgcagctgtacatgaactactgctccggctgccacgcattgaagtacctgcgctattcgcggatggcgcaggacctcggcctgaccgaggaagaggtgatgaacaacctcaacttcaccggctcggcgatcggcgacccgatcccggtggcgatgcccaaggagaacgcggagaagtggttcggcaagatgccgcccgatctcagcctgatctcgcgcgtgcggggcagtgactgggtctacacctatctcaagtcgttctatctggacagcagccgcccgctgggctggaacaacgcgctgttcgccaatgcctccatgcccaacccgctgtgggagatgcagggcctgcagcatgcggtgcacggcaaggcggaagcgcccggcatggacccgccggtgaccggcctgaaaatcgaaacgcccgggtcggtcgatgccggccagtacgatcaggccgttcgggacatcaccaacttcctcgaatacgccggtgaaccggccgcgctcaagcgccagcagctgggcgtatgggtgatcctgttcctggccctgctgactttcctgctgtacctgctgaagaaggaatactggaaggacgtccactgattctgccgccggccatcgcccgggcctattggcttttgtgatggtcggttgcacactcggggtggagtcgaccgctggcacggtgccggcggcgccgatgcggcaggcggtctcctgtcgtgggagagcctttgatggcggcgagcgtacgcatgcgcaatacactgacgctgttttcctcgaacgacgacgtactgtgccaccgggtacgcctggtgctggcggccaagggggtcaccttcgactttgtcccggtcgatccgcagaacccgcctgaagacctgatcgatctcaatccgtaccactcggtgccgaccctggtcgagcgcgagctggtgctgtacgccgcgtcggtggtcagcgaatacctggacgaacgctacccgcatcctccgctgatgccggtcgatccgctctcgcgtgcgcgtatccgcctggccatgctgcgcatcgagcacgactgggtaccgcaggtgcaggccatccagctgggcaacaagacccaggccgaggccggccgcaagcgcctgaaggaactgctgaccgcgtcgctgccgctgttcaaggccagcaagttcttcctcaatccggaaatgagcctggccgactgcgcaatggcaccgatcatctggcgcctgcagtcgctggacgtgccgctgccgaaggacggcaaggcgatcgaggactatggcaaccgcatcttccgtcacccgggtttcgtccgcagcctgaccgaccaggaaaagaagctgcgcgatctgccggtctgatccaaccttgcgtaacccgtctgcacgccgaccggcgtgcaggcgatccgccccggcggggcgccgggcgcgtacacttcacgcatgaccgaagacttcttccacatgaccagccaccgcccgtacctgctgcgggcgctggtggaatggatcaacgacaaccagctgaccccgcacatcctggtcgacgccggcgtccccggcgtgcaggtgccgccttcggcggtcaaggatggccgggtcgtgctcaacatcgccgaacgcgccgtcgtgcggctgatgatcgacaacgaaatggtgagcttctcggcccgcttctccggcaccagctacccggtgcaggtaccgatcagcgccgtgctggcggtctatgcccgcgagaccgggcagggcatggcgctgccggatgacattccgggcagcgagaccgcgccgaccagtgacgaactgctgcacgaggacggcacgccgccggacgatacgccaccggccagtccgccgcccaagggccgcccgaacctgcgcgtggtcaagtaaccattccgacgccgccccgatgggcggcgtcttcctttgcaggttttaccggtgggtgccggaattgtgtgggtgtcgaccgttggtcggcacaccttcagttcttacacatcctcggcatcctccacatccggccggatctggctgatccgcgcggcaccggggccggtgaacgagatcagctggtcgccgcgcagcaccatgcggcccacgtggcgatcgatgccatcgtaggaatactcgaacttgaaggtgcgctcgaaaccgagccgtccatcctcgccacgcgacagtcgcaggccggtggcatgtaccgcctgatccagccattgcacgtcggcagcgcggcaggcattgcggcccagctcgaccgcgcgctcggcggccgaacgcgccgcattccagaagaaatagatgattccgccggcaatcagcaacaacagcagggtgggcatggcgtcagccgtcagaggtggatccggcaaagatggcggcgaacgcgcgctggatcaagcgctgcactcaccgccgtggctgcggttcgctggacatcggtgatgcgggcacgttagacggcgccgtcgccggcaccgtctgcatcggcgcggcggagggcgaaggcatcaccaatggcgcggtcgccgtcagctgcagcagcgctgcccagtcctggcggttgaagctgcattcgtcctcgcggcccggcgtgcagctgggctcgatgccggtgctgttgcgttcgcgcgccggcggcagcttgatcaacccggtgcggtccagcggcagcagtcgcatcgccaccgtgttcatcacgttgccgcccaccaggtacagggtctggtcgccccccaggttggcggccaccactacttcgcaatgtgatttccagtggcccaccgaaccgttgcccagtgcctgcaccagcccactgtagctgagcgtggtgctgcgatcgcgcaggaagcacagcaggtcgcccggtgcgggctttgcggtcgcgggatcgaccagccggtacggcacgcccgagggtccgccctggtacgcggcacggatgtagtcgatgtggcgtggcgacgcgttgaagccggggacgccggactgcaccatcacccaggaaatgaacgcggccgaccacgggttgtcgatcaggaaggtgcggcagtcgctgtcggtgtagcgcgtgcccagtggtgccagacagctgctggcgccggcgatgctgcccatcgcgttgagcgtgccgctgttgcgccagtagccggccacgcgctgccaggcaatcagcccgttgtcggccagatgttcgttctcggcctcggtgacactcaggctcgccgcgcggccatcgcgatcgatgaaaggccggaaccagagccggtgttcattgcaggcagtattgcggatggccaccgccaatgggctcaggccgaaacgcggtggcacatcgcaggcttcggccgccgctgcggataggggtgccgcggccagcagcagacaggcaggcaagagcatccggcgcatgcgcggctcctgtgggggatgccggcagcgtcgcagaggcggccgtagccgagccgtgaaggcgtcccgggtcgtgtagagccgagcccatgctcggctcatcgcgcgaagcgcgcgcagggcgtgccgcaaatcgacaagcagccgagcgtaggctcggctctacaagtcctgcaggcctcagcccggcggtgggccgagcttcaacgacagatcgatggcctgcacgtgcttggtcaggccgccgatggagatgcagtcgacgccatcctcggcgatcgagcgcaggccacccaggccgacgctgccggacacttccagcggaatgcggccggccgtgatgcgtaccgcctcgcggcgcaggtcggggctgaagtcgtccagcaggatgcgttcgcaaccggcgtcgagcgcctggcgcagctgcgccagatcctcgacctcgaccaccagcggcagcgcaggccactgccggcgtgcgcccgccacggcgtcggccagtgagccggcagcgcggatgtggttctccttcagcatcaccgtgtcgtacaggccgaaacgatggttctcgccaccgccgcagcgcaccgcgtacttctgcgccaggcgcaggccgggcagggtcttgcgggtgtcaaggatgcgcgtgccggtaccggccaccgccgccacgtagcgggcggtggtggttgccgtaccggacagcgtctgcaggaagttgagcgaggtgcgttcggcgctgaccaggctgcggctgcgcccatgcagcagggccagcacggtgcctgcggtgaccgcgtcgccgtcggaaacctgccattcgatgcgtacgtccgggtcgagcgcgcggtgggtggcgtcgaaccaggggcggccggcgatcaccccgtcctgcttgcacagcaggtaggcgctgtcggcctggtcgggcagcagggcggcggtgacatcaccgctgcccaggtcctcggccagtgcacgcgcgacatcggcggcgacaacggccgcatccggcgtcggcagcgtgctcatgcggtcgggaaatcggcgatctgggcggtcgggatggcttcctcggccagcagcaccgggatgccgtcgtcgacgcggaagacctgcttgcggtcgcgggtgaccagcgcttcgcgcagcggctgcgccagcgggttgccatcggccttgttcaccgcgccggcggaaatggccttgttgagggcttccaggcccttgccatccagcagggacaggggctggcgggtgtcaggcgacaccagcaggtcgagcagcttgcgatccatggttcttcgtcttgcgtggaagatggctagaatacgtctttaaggcaggtgacggccaatgacccccaacccgatcgcgccgcttgtcggcatcgtcatgggttcccgttccgactgggaaaccatgcagcacgccgcccagaagcttgaagccctgggtgttccgttcgaagtgaaggtggtgtccgcgcatcggacgccggatgtgttgttcagttacgccgagcaggcgggcccgcgtggcctgcgcgcgatcatcgccggtgccggcggggccgcccacctgccaggcatgatcgccgccaagaccgccgtgccggtgctgggcgtgccggtgcagtccaaggccctcaacggcatggattcgctgctgtcgatcgtgcagatgccggccggtatcccggtcgccaccttcgccatcggcaatgccggcgcgtccaacgcggcgctgttcgccgccgcgatgctggccagcgaccagccggcgatcggccaggcgctcgacgccttccgtgcacgccagaccgaagacgtgatggcccacgacgatccgcgccaatgagcctgaccgtcggcatcctgggcggcggccagctcgcccgcatgatggtcctggccggtgcgccgctggggctgcgcttcgaactgtatgacccggcggccgacgcctgcagcggcccgctggcgccgctcaccgtcggtgccttcgacgaccgccaggcgctggcggacttcgctgccaaggtcgatgtggtcaccttcgatttcgagaatgtgcccgccgacagtgcacagttcctggccgaccgcgtgccggtctacccgccgccggccgcgctggcggtggcccaggaccggttgagcgagaagaccctgttccagcagctgggtattccgctgccggccttcgctgatatccgcagccgtgacgagctggcggcgaaggccgccgaattcggcctgccgtgcatcctcaagacccgccgcctgggctacgacggcaagggccagttccgcctgcgcagcgaagccgacattgatgccgcctgggatgcgctgggtgcacaggtcgagcgcaccggactgatcctggagggcttcgtggccttccagcgcgaggtcagcgtggtggccgtgcgtggccgcgatggcagtttcgaagcctggccgatcaccggcaactggcatgtcgacggtgtgctgtcggccagcgtggccccggccgtgctgtccgccgccgagcagcaggcagccatcggctatgcacgccgtgtcgccgaacacctgcagtacgtcggcgtgttcgcgctggaactgttctgccgcgatggcgagctgctggccaacgagatggcgccacgcgtgcacaactccgggcactggaccatcgaaggcagcgagacctcgcagttcgagaaccacctgcgcgccgtgctgggcctgccgctgggcagcacccgcatgctcggccatgcctgcatgctgaactggctgggccggatgcccgacccgttgccggtgctggcccaggccagtggccactggcatgactatggcaaggagtcgcgcgaaggccgcaaggtcggccatgccacgttgcgcgatgacgatgccgcagcactggccgacgcgttggaccaggtgggcctggaactggaccgccaggcccaggtggcaccggcggtgtacgcgctgcgcaaccgctgagtccggtagtgccggccgcaggccggcagtgcaacggtgtggcgcaccggtgcagccatcggcgcaacattcccggtggtagcgtggagctcctttcacaggagtcacgaccatgctcgactggaatgcctaccgcaaggaactgaagggccgcatcggcgagatcggcaagctctcgccggatacggtcaagggctacgccaccctggccaatgccggtgcccagaccaaccacctggatgccaagacccgggagctgatcgcgctggcggtggcggtgaccacccgttgtgacggctgcatcaccgtgcacgtggacgcggcgctgaagcatggcgccagtcgcgaggaaatcgccgaggcgctgggcgtggcggtctcgctcaacgccggcgccgcgctggtgtactcggcgcgggtgatggatgcggtggccgcgcacgagagcgcgtgaagcttcatctgtagagccgagcccatgctcggctgctgtccggccagccgagcatgggctcggctctacagggggtcagcgcagctggctctcggcgaattcccagttgaccatctgccagaacgcgtccaggtaacgcgcgcggtcattctggtagtcggtgtagtacgcgtgctcccacacgtcgcagcacagcagcggggtgctgtcgccggtcaggggcgtgccggcgttgcgggtggcctggatgcccagctggccgcccgggtgctgcaccagccacacccagcccgagccgaacaggcccagtgcagtgcggttgaactcctcgcgcaggcgctgcgcgtcaccgaactggcgcttgaccagctcgcccagccggccctgcggttcgccgccgccgcgcgggcgcaggcactgccagtagaagccgtggttccaggcctgggcggccgcatcgaacagcgtgccctgggcatggcgcacgatctcttccagcgacgcctcctcccactcggtgccgagggtgccggcgttgaccgcgtcgacataggcgcggtggtggcggccgtgatgcagttccacggtctgcgcggacaggtggggctgcagggagccggagaggtagggcagggcaggcaattcgacgggcatgtgcaggttcgtggccaggggacggcggcagcctgttccatccgcttacaatggcggctaccgtgggcagtctagccgaccatcacggtcgggttgtccggcgaagcaaggagtgtggttgtggcggtaatgcagcaaatccaggccgaggtcgatcgttacccgctcgtgctgttcatgaagggcaccccgcagtacccgatgtgcggcttttccagccgcgccgtgcaggcgttgatggctgccggcgccgtcaccctgcgcaccgtcaatgtgctcgaagaaccggagatccgcgccaacctgccgcgcttctccaacctgccgaccttcccgcagctgttcatcaacggcgagttgatcggcggctgcgacatcgtcatggaactgtttgaatccggcgagctcaagcgcatcgtcgaagaggcgacccagggatgagtgcctggccgtcgacgtcaccgactgacggggcgctcgatggccgcccgttgcaggaccgcgtggtgctggttgccggtgccggcggcgggctgggcagtgcggcggcgattgccgctgcggcggccggggctaccgtggtcctgctggggcgcaagccgcgccggctggaccgggtctatgcccaggtccaggcggtcggcccggaacccctgctgtacccgatggacctggagggtgccggccccgatgactatgccgaactggcccaggccctgcagcgtgagctggggcggctggatggcctgctggtctgcgccgcgcatttccccggcctgaccccgttcgagctggccgacccggccagtttcgcccgtgcggtccatgtcaccctgaccgccccggcctggctggcccaggcctgcctgccgctgctgcggcagcgcgaggatgctgccctggtgttcgcggtcgatgcccccgaacgggtggggcaggcctactggggcgggtatggcgtggcccagcacggcctgcgtggcctgatcgcgagcctgcacgatgagctgggccgcagcccggtccgggtcagcggcctgtacccggggcccctgcgcacggccctgcgtgcccgcgcctattccgtcgaccaggacccggccgcgcaagggcccgaagcggccgccgctgcggccgtcaccctgttgtcccgggccggccatgcctggcgggggacgattctcgatgccagcggggcagttccccgcgagtgagccccggggaaaggcggagtgaagaacccgtcacgattgcgttgcgaaccggtgccgtttgtcgcacaaccgtcacattgatggcgtagcgtgttaatctagtgttaaccgttatggctgccttcagccaagcggtagggaaccccagataactctccgaccagccacccgcagggctgtttggatgcgcttttttttccgccatcgccaactcgcatcgaggctaccgaaaaatgacccacccactccggatgtccaagcttacccttggtctcgtggctgcacttgctgccgctcccgccttcgcccagaccaccactgccggtgtcggcggccaggtcgtgaccagcggcggccagcccgtcgccggtgctgaagtcaccatcacccacaccgagtcgggcacggtttcgcgcgctaccaccgacgcggcgggtcgctacaacgcgcgcggcctgcgcgtgggtggtccctataccatcaccatcaccaagccgggtgaaggcaccaaaaccgaagatggtgtctacctgggcgtgaaccagaccggcaccatcaatgccatcctgaccggtgacgtggccaaggccaccaacctggacaccgtgcaggtcaccgccgtcggcggcggctcggaagtgttcagcgccaccaagatgggctcgggcaccaacatcagccaggagcagatcgagattgcgccgtccatcggcggcaacatccaggatctgatgcgcctggatccgcgcgtgaccttcatcgaccgcgcctcgggctcgatctcggccggtggccagaacccgcgctacaactcgatcaacatcgacggcgtctcggccagcgacaccttcggcctggaaggcaacaacatgccgacccgccgccagccggtcgcgatggaggccatcgaagcgctggacatcaacctgtccaactacgacgtcagcatcgctggcgctgccggtgccaccgtcaatgcggtgaccaagtccggtaccaatgaattccacggttcggtgtacggcacctaccgtgacggtgactggttcggcaagaacccggaaggcaagaagttcaacggcttcaacgacgaaaagacctacggcatgaccctgggcggcccgatcgtcaaggacaagctgttcttcttcgccaactacgagaagttcaagcagtccgcgccgggcgccgacctgtccagcaccgcgctgggcaaggccaatgccgactacagcatggctgacgtgacccgtgcccaggaaatcgccaagggttatggcttcgatgccggcggtatcgaaagcaacggcaacacggatctggaagagtacgcgctgaagctcgactggaacatcaacgagaaccaccgcgccaacatccgttacagcaagctcgagcagagcaagctgcgcatcaacggcatgggctcgacctcgcaggcttcgctgagctcttactggtaccagcacgtcaagaccaacgagagctacgtcgcccaggtcttcagcgactggaccgacaccttctcgaccgagttgaaggcttcgtaccgcgagtactcggccgtccgcgaggtgccgaccaatgccccgagcatccgcatctacttcccgcgcggtggcgatgtgaccacgccggaaggcgactcgctgttcctgggtaccgagaccaactcgcagaacaacgtgctggaaaccaaggcgtggaactactacgccgccggtacgctgaccttgggtgaccacgacctgaagttcggtggttcgtacgacaccaacgatgtctacaactactatggcgctggctcgtggggtgcttacaccttctatggcctggacaatttcgccaaggggcagtggcagacctaccagctgaacaaggaaaagagcgcgaactcgatcgcggctgactacaagtacagcaacctggccctgttcgtgcaggacacctggtacgtcaacagcaacctgaccctgaccatgggtctgcgtggcgaccgaccgaaggtgagcccggcgccggcgtacaaccagaaggcgcagactgtcttcggttatgacaatagtgcggtgttcccgagcaagttcctgatccagccgcgctttggcttcaactacaccttcgacaccgagcgcccgacacagctgcgcggcggcatcggcctgttccagggtgatgcaccgcaggtgtggatcagcaacagctactccaccaccggcttcaactacgactcgtacaacatcagccgctacaacggccagaagttcaatccggacaaggacaaccagccggtcccgaccactccgggcagcgcgctgcagaacgtcaacttcgtcggccgcgacttcaagctgccgtcgctgtacaaggccaacctggccttcgatcacgagctgccttggtacggcatggtcgcctcggccgagctgctggtcaccaaggtcaaggatggcctgtactaccagcacctgaacctgggcaagggccgtcaggtcggtgccgatggtcgcgtgaactactacgtgccttcggctgacggcagggcgtggggcaccaacgatgcgcgtaatggttacgccgcacagggcttcaacaacgtctacctgatcgacaacaccgatcagggccgcacctcgcagttcaccgtctcgctgagcaagccgtggagcgcgagcagcgactggtcctggaacctgggctacacctacaccgatgccaaggaagtgggtagcctgaccagctccaccgccagctcgggctggggctaccagtatgccttcaatgccaacgaggaaatgctgaacacctcgcgctaccagatccgagaccgcctgtcgggctcgctgaactggaagcacaagttcttcggcgactacgagaccaaggtgggtctggtgtacgaaggccgcagcggccgcccgtacagctacatctatgtgaacgacgccaacggcgacggccgttcgggcaacgacctgttctacgtgccgcgtcgcggcgaggtcctgttcggtaccctgtccaacaacggcaagttcaccgccgatgcggcgatggagaagtcgttcttcgactggctggcggccaacccgcagctggccaagtacgaaggccaggtggctccggccaaccagttccgtaccggctggatcaacaccttcgacatccgtatcagccagcagctgccgggcttcatgaagggccacaagtcggagatctggctggacatccagaacgtcggcaacatgctcaacaagaagtggggcaacatctacgactacggcttctacgccaacgctcgtgttgccagcctgcagggcctgtacaacggcaagtacgtctacaactaccgtggcgcggacctgccgagcgtcgccaactccgatgctgacggcttcgacgtcggtgtctcgcagtggtcgatgcagctgggcttccgctaccagttctgatgcactgacgtagcgctgctgtaaacggaaacggccggggaaacccggccgtttcccgttcaggcgaaagtccttgcggggtgctgggcaacggcgtagcatctggaaatgtgcgcggtgccaatgccgccgatgcggtcccggacaggcgaacgcgggcagcacacatccaacggtcgggcttcccggccgttttgctttttaagggggcggcagtacagtcggaaaccttgaaggaagcgaaaaattggatatgaccacgaacgaaaaatcagcccgtgcactgccggtgcaggatgcgcggatctacccgcgcggtgggctggatgtgctgtcgcgcgccgaggtcgcacgcctgcgcgatgcctccgccggcggcatgcatgagctgctgcgccgctgcgcgctggctgtgctgaccagcggcagcgcttcggacgatccgcgcgcggcgcgcgacctctaccctgatttcgacatccaggtggcgcagcaggatcgcggcgtgcgcatcgacctggtcaacgcaccggcgatggccttcgtcgacggcgagatcatccgcggtgtcgccgaactgctgttcgccgtcgtgcgcgacctggcctacatggccatcgagatgggcccggcctacgcggccgagctggagtcgtccgagggcatcaccaacgcggtgttcggcctgctgcgcaatgcgcgcatcctcaacccgggcgatccgaacctggtggtgtgctggggcggccattcgatctcgcgcgacgagtacctgtacaccaagcaggtgggttacgagctgggcctgcgcggcctggacatctgcaccggctgcggtccgggcgcgatgaagggcccgatgaagggtgcgaccatcgcccatgccaagcagcgccgcaccgtcacgcgctacatcggcctcaccgagccgggcatcatcgcggccgagtcgccgaacccgatcgtcaaccacctggtgatcatgccggacatcgagaagcgccttgaggccttcgtccgcatcggccacggcatcatcgtgttcgccggtggcgtcggcactgccgaagagatcctgtacctgctcggcatcctgctgcgcgaggagaacaaggacctgccgttcccgctgatccttaccggcccgaccgtggcggcgccgtacttcgagcagatcgaccgcttcatccgcctgaccctgggtgatgaggctgccgagcgctacgagatcatcatcggtgacccggtcgcggtggccaagaagatggccaacggcatcaagcgcgtgcgcgagcaccgcctggcgcagaaggactcgttcttcttcaactggtcgatcgagatcccgtgggagtaccagcagccgttcgtgccgacccacgaggcgatggccgcgctggacctgcaccacgggcgtgcgccgcacgcgctggcggccgaccttcgccgggcgttctcgggcatcgtcgccggcaacgtgaaggaggacggcatgcgccgcatcgagcagttcgggccgttccagatccacggggatccggacatgatgcaggcgctggatgcgctgctgcgcgccttcgtcgagcagcgccggatgaagatctccggcgaataccagccctgctaccaggtgctggcctgaacccgggccggcgcgatggggatcgcgccggcactggcaggggagggcggctcgtcaagcctttgacgcccgtcgccccggattgaccgttcatcctgccgccgcttgccggtggcgggacgatggcccatcgtggccaccaacacgctggggagcgtccaatgtctttgcgccggcaaaacggtttcacgctggttgaactgatggtcacgctggccgtcttcgtgatcctggcgtcgatcgcctatccgagcttccgcgggatgatccgctcgaaccggctggcgaccgccaacaatgaactgatcgcgctggccaacctggcccgcagtgaaggcatccgcaacagcaacggtggcggtgtctgtggcagtgccgatggcaaggcctgtgatggcgactggtccaagggcgtactggcctggtcggaccttgatggcgacggtcagatgggcagtaatgacgtcgcgctgcgcttttcgcagggcaacccgcaactcagcgtggtgggtccgccgggcgcggtcatcgccttcgacgggcgcggccggcgcagggcggtcgctgatcagaccctggtgctgtcgccggatgcgtgcaaggccggtgaatcgaaaagcacgttgacgatcaaccaatccggccaggtccgggtgaccaagggagcctgctcatgagccgccgcaacctggcccgcccgcgctcgtcgcagggtggcttcagcctgatcgaagtgatggtggcggtgctgatcctggcgttcgggctgctgggctttgccttgctgcagaccaccaacgtccgcttcgtgcagagcgcaaactaccgcacccaggcgaccaacctggccaacgacctgatcgaactgatgcgcgcccagcgtaccgacacgctggccggtggcgcctattcctctgcctcgttctcggccggctcggtgaagcccagcggcgcctgcgcctggccgaccggcgccgccgtgacgccgaagacgaacgtggcgcgctggcagtgcgaggtcgcacgcacgctgggcgagaaggccagcgcacaggtgaccttcgtgcagagcaccggccaggtcaccgtggccatcagctggggagaccagcgctgggatccgaaggatcccgacagccttaccaccttcggcctgacgaccttcctgtgaacgcgcccatgagtccaatttcgcgagcccgaggcctgtcgctgatcgaactgatgatcgccatggtcatcggcctggtcctgatgctgggcgtcacccagatcttcatcgcctcgcgtgcggcgtcgcgcctgtccgaaggcgcggcccgtacccaggagaacgcgcgcttcgcgctggatttcctgcagcgtgacctgcgcatggccggccatttcggttgcgtcaacgaccaggcccacgtggtcaagaacaccggcgatgtcggctaccacctgggcatcagctcgggcagtggcgacccgctggatttctcggttccggtacagggatacgaggctgcaggcacggcgccgggcaccacgctgacgctgggccgcgcctggagcgcggcgcagtcggttccgaagagcatcgccaacctcaagccggcaccattgccgggcagcgacatcctggtgctgcgcctgatgagtccggaaggggccgtggtgaccggcatatccgtggccgcgggcgcgaccaccctgaccgtctccagtgatggcatggcccggctgaaggccaacgccgcaggcacgccgacggtcttcggcgtggccgactgcacccgtgccgacgtgttcccggccaccatcagcggttcgacggtgaaggtcgacaaggtcgacctgagcaactattcgatcaacaacgcgatgaccatgctgtatcgcgccgatggcatggcgtattacatcgcgagcaaccccaatggcgagccggcgctttaccgggcacgtgccaatggcgccggcggctacgccgatggcgaggagctggtggaaggcatcgagaacatgcagttcctgtacggcctggatgccaccaccaacatctccctgcccacgccgccgaccggccgcatcgtcgaccagcgcgtggccagtgcggtcagcaccggcaccgatgccgccgccgccgcgcagtggcgacgcgtcggcatggtgcaggtcggcctgctggcacgcagtccgcagcgtgcgtcggccgaagcgccgggcagtgcggccacgtatccggccatcctgggggtgggctttgccccggccgatccttacgaccagcgccatcgtggcgcctatgaagcgtccgttgcactgcgcaaccgcttgttcgggaactgacgaccatgcgcactcatccttcctccaggcgccgccccttcgttgcccaggcacggcagcagggcgctgttctctacgtcgcgctgatcatgctggtgctgctggccctgctgggcgtgatcggcatgcaggtggccggcatgcaggagcgcatggcggccggctaccgggcgaccaacatggcgttccagaacgccgaaggtgcggcgcgcagcgccgagaacgcggtggagaacatcgccaaccgcaaggatgccggcgccaatccggccgtggcctcctccgacatcaaccagcagtgcgatgacggcttcgacccctcggcctgggtcgcgaaaaccaagctgggcagcaagccggccatctatgtccgtgagatccagggctgcatccagggggagggtgcgctggacatgggcaagtcggtggagaagccgacgccggtctaccagatcacgacctatgccggtgataccaccagtgatgcgacgtcgcgtgcggcgatcgataccgtattcaagctgtgagggtggggagcccatgaacactcgcaaccgcaggatcctggcaggcgttggccttgccgtcttggccgctggcggctatctggcgcataccttgtttgccgcacaggcgcagggcgtgctggcacaggagccgatgaacgtgcagacgcgcgcgacaccggcgttcatcatggcggtggacgattcgggttcgatgaacttcgaacgcatgttccccggtggtgacggccgcatgcgctggaacagcaacaccaacagcttcttcaacaacgatggaagcttcttcagcgtgggctcggcgtgcgccagcaactcggtggactgttacctctacctgtatccgcacgcggagttcaacaaggaatactcgccaggccgcgccattccgccgctggatatctacggcttcgcgcgttcgcatgtctacaacgccagttacttcaacccggacgtgacctaccggccgtggaccaatgccgatggtacgttgtgggccgatgcctcgatcacccagacccgtgccgatccgcgttcggcccagcgcggttacaacgctgtctacaacatgacgaccgaccgttccaccacggcggaacagttccagtttgtcagcggcatgcggattcccgacctgtccggcaccggcaactcctactacaccggtcgtggctggagcacggcggcgaccagcatcaccagcagcaccacctatgcggtgacctatttcccggccacgttctacctgcctgcggcggcaccggctccggcgggctacaagacggacaatgccagccggccgctgatcgcaggggcctgtggtcccagctgcgacatgcgccgctaccagatcaagccgggcaactattcaagtaccgcggcctacaacaccgcgatccagaattttgccaactggttccagtaccaccgcaaccgcgtgctggcgatcgtcggttcgtcgaccgcggcgctggtgagcgttgacacgatgcgcgtgggctacttcaccatcaacaagctcagcaacgcgaccatgtacgacatggtcaccaaccgtgctgacctgtactcgcagatctacgggttgaccgccaatggtggcacgcccaatcgtcgcgccgtggagtacctggtggatcagttccgccgtaccgacagcggcgcgccggtgcagctggcctgccagcgcaacggcggcatgctgttcaccgacggctacaccaactccggcaacacggcgaacagcggcttcggtgatgccgactcggtgaactccacccacctgccgtccattccgttcgccgatggctacagcaataccatcgccgacatcgcggcggcggcctatgccggttcccgcacgcccctgcgtaccgggaccagcttcccggccgggcaggtgccggtcagtgacaagtgcaattcgctggacaagagcagtccggactggaagcgcctggactgccagaccgacctgcacatgaacttctatggcgtgaccctgggcgcgcagggcaagatctatggcgtcaaccaggccgctaccgacgatccctacaagaacccgccgaactgggccggcaatggcaacccggtaaatgtcgatgacggtaccgtcatcgatgaactgtggcacgcggccgtgaacagccgtggcgaattcatcaacgcacagaccccggcggacgtcaccgaggccatgcgccgggtgctgtcttcgatcaccggtggtgcatcgccgtcgggaacgatcggcatcagtggtgcgcgcatcggcaccggctcactggcggtgactccgcgctatgacatcaccaacagtggcaccgactggtcgagcaagctgaccgcatccagcgtcaaggtcaacgctgaccaggtggccgagctcaccgaggtgtgggaggcgtccagccgcctgtcctcgtccagccgccgcattgtcgccaacaagctgggttcgccggtggatttcaacagcgcccgcatcagcttgcaggatctgtgcagcaagcccagcggcaagtacgcgacgatgctggtctgctccgccgacaagctgacggcgatcaaggccgacctggccagcgcgatcaactacctcatggccgacagctcgaccgaagtccgcaatggtggcaagtatcgtgaccgcactacgccgctgggtgacatcgtcaactcggcgccggtggtgagttcgccgttggacgactacggttaccgccagctcggtggcgcctacgccaagagctatacggactatctggccaccaaggccaagtcgcagcggtacatggtgtatgtcggtgccaacgacggcatgctgcatgccttcgatggcggcatgaaggctgacgccaagcaggatggcacgggtggcacggagagcttcgcctacatcccggccaccgcgctggggcacatggccaacctgctgttcccctacaagtccgacacggccgaccagaccttccgccaccgttattacgtcgatggcccggtagccgtgtccgatacctacaacggcaccgcgtggcagaccagcctggtaggcaccacgggtgcaggtggtcgttcggtgttcgcgctggacgtcaccacgccgggcagcttcggaaccggcaacgtgctgtgggaaatcagcgacatcaactcgtcgctgcgggacgaggtgcgcaacaacatcggattcgtgctgggcaagccggtgatcgtgccggtgaagagtggtaccggcgtggcctggaaggcgattttcggcaatggctacggcagcgccaacggcaaggcggtgctgttcgtggtcgacatggccagcggcgacatccggatgatcgaagcggtcgaaggcacgtcgggcgcgggcatctccggggacaatggattgggcaatgtggtcgtggtcgatcgctggacaggcgcgagccaggatgcgcgcggccgtgatggactggccgacaccgtctatgcagccgatcagcgtggcgcggtgtggaagttcgacctgaccagcagtgcgaataccacgctgaccgtgccgatgttcaccagccaggcggcacaggactcctccggcaagacctaccgccagccgatcaccggtggcatgaccgcagcgaccggcccctcgggcggtgtaatgctctatttcggcaccggtagcttctcgttcaccagcgacaaggatgacaagtcgcagcaggcgctctacgccgtaaacgatctgtcgggaaagacggtgacctccacggtgaccgctaccaatctcgttccgtatacagccgccgccgccacaagcagcgatgaacgcaagatcactgcaggcgtggcgccggccaacgcgcgtggctggatgattcaacttcccgctggcaacggcgaacgcgcggtaggcaacccgatcctggtcagcggcattgtcttcatgccgacctatgtgcccaacatggaaacggtcggctgttcgaccagtggttccaactggctgttcggactgtcgtcgatcagcggcttgccgatgttggagaacgtgcgctatggctcgccgaccggcagccggcccggggcagcgaccgccgccatcgcgttgaagaccggaggaactgcgccggtccgtgacgtttcgctgtcggtgctgccgcgtccgacggacaacaaggcgccgcccggaggcagctcctgctggatggccgtcggcgcggcgggcagccagtcgctgtatctgccttacccttgcggtcgccagtcctggcgccagctccagtaaccccagtgcgaggatccacgctcatgttgcacactcacatgcctcgccgcgcggctggctttacgctgatcgaattgatgatcgtggtgatcgtcatcggcatcctggcggcgatcgccattccgtcctatcaggaatacgtgcgccgatcgcatcgtgccgtggtgaaggcggacctggctgagtacgcacagcgcgccgagcgctaccacaccagcaacaactcctacaccggctacgcgctgccgaccaaggtgtcgccccgtgatggcggtaccgtgcgctacaacctggactacaagggggatggcaccagcttcaccatcaccgccaccccgcagggcacgcaggccaaggacagctgcggcacgatgagcgtggaccaggccaaccgcaagacggccgacggtggcgttgccagttgctggtgaaacaggtgttgatcttcctgtaatcgaccagtacaatgcgcctccccgcccgaatagctcagccggttagagcacttgactgttaatcagggggtcgttggttcgagtccaacttcgggcgccagacactgcaaaagccgcgagaaatcgcggcttttgcttttctgcgcaggtagtcagcagggcgtatcgcggtccacgcgttcacttcgcacgcggccgccattgttgacgatcaacgcaccgtgcagccggttgcccgcgcagatgcgcagggtcaggttggcccctgggctgcgtccgtctgcctggaagaacagctggggccgcccgctgctggcctgggcaaggatcgatatgtccgagcgcccggtgtgatggttcaggatcgcctccggcgacgttggctccccgcgctggtcgccactgcggtagatgatccagccggcgctccagtcgtcgctgcagtgcaggccgtcgatactggcgcagaggccgatcagctcgcgtctgcgcaatgcctcgctgcgcgcgccggccaggctggcgtgcagggtcagttgtagtgcatcggcgcgttgccgcagcagcaaaggctgcagcgccggccaggacgccgccagcagcaccgccagcacggcgatgaccaccagcagttcggtcaggtgcacgccccgcgcagagcgggggccgagggggcagggggcatgggtcgggtgcatgcatccagcctccgcgcccggctgcgcggccgccatcgggaatccccgtggcgggctgcccggccacccctcagccagccgtcacccctcgccccgtatactcatccttcccgggaactggcaacaccatgagcgacagttttgaacttgtctcgccgtattcgccggcgggcgaccagcccgatgccatcgcgaagctgaccagcaacttcgaggccggcatcgccaagcagaccctgctgggcgtgaccggctcgggcaagacctacaccatcgccaacgtcatccagaacattcagaagccgacgctgatcatggcgccgaacaagacgctggcggcgcagctgtatggcgaattcaaggcgttcttcccgcacaacgcggtggagtatttcgtcagctattacgactactaccagccggaagcctacgtgccgtcgtcggacaccttcatcgagaaggacagttcgatcaatgaacatatcgagcagatgcggctggccgcgaccaagaccctgctgtcgcgcccggacgcgatcgtggtggcgacggtgtcggcgatctatggcctgggcgcgccggaagactacctgtcgctgcgcctgatcctgtccaagggcgagcgcatcgaccagcgcgacctgatcaaccacctgacccagctgcagtacacgcgcaatgagtacgaactgcagcgcggcaccttccgcgtgcgcggcgaagtgatcgacgtgttcccggccgagtcggacagtgaagcgctgcgcctcgagctgttcgatggcgaggtcgagaagatcaccctgttcgatccgctgaccggcgagacgctgcgcaacatgcagcgcttcaccgtgtatccgaagacccactatgcgaccacgcgcgaacgcgtgctggcggcgatcgagacgatcaaggtggagctgaaggagcggctggagcagctgtacgcgcagaacaagctggtggaggcgcagcgtttggcgcagcgcacccagttcgacctggagatgatggccgaggtcggttactgcaacggcatcgagaactactcccggcacctgaccggcaaggccgccggcgagccgccgccgaccctgttcgactacctgccggccgatgcgctgctggtcatcgacgaatcgcatgtgaccattccgcagatcggcgccatgttcaagggcgatcgctcgcgcaaggaaaccctggtcgagttcggcttccgcctgccgtccgcgctggacaatcgtccgctgcgtttcgaggaatgggaggagcgttgcccgcgcagcatctacgtgtcggccacgccgggtccgtatgaataccgcgaggccggagacgagatcaccgaactggtggtgcgcccgaccggcctgatcgacccggtggtggagatccggccggtgggtacccaggtcgacgacctgatgagcgaggccaacgcgcgcatcaaggcgggcgaccgcgtgctggtcaccacgctgaccaagcgcatggctgaaaacctcactgaatacctcaccgagcatggcatccgcgtgcgttacctgcactcggacgtggacactgtcgagcgtgtggagatcatccgcgacctgcgcctgggcaagttcgacgtgctggtcggcatcaacctgctgcgcgaaggcctggacatgcccgaggtatcgctggtggcgatcctcgatgccgacaaggagggtttcctgcgctccaccggctcgctgatccagaccatcggccgcgccgcccgcaacgtgcgcggcaaggcgatcctgtatgccgaccggatcacccgttcgatgcaggcggcgatcgatgaaaccgaccgccgccgcgccaagcaggtcgagtacaacgaagaacatggcatcgtgccgcgctcggtggcgcgcccgatcgtcgacgtcttggagggcgcgcgttcggatgccgcggagaaggaagccaagaagggcaagggcaagggccgggcgggcgtggccgaagaggcgaccgactatcgttcactgtcgccggcgcagctggctgtccgtctcaaggcgctggaacagcagatgtaccagcacgccaaggatctggaattcgaggatgccgcgcgcgtgcgtgaccagatccgccagctgaaggaagccagcctgggctgaacgcggcagtgcagcatcatcttcacaaaagtgttgcgcttccctgccggcatccgtaatatacgcggcctgcaccgacgcaatcgcggaaatgcagaagcaaaacgggcggttagctcagcggtagagcactaccttgacatggtaggggtcacaggttcgaaccctgtaccgcccaccacgaagtcctcgcaaaagggctctcgtgaactgcaaagcccggccctggcgccgggtttttacgtaacaaggccagccttcgggcggcaagaacaagatgggcggttagctcagcggtagagcactaccttgacatggtaggggtcacaggttcgaaccctgtaccgcccaccacctgttcccggcgttgccggtgaagcggtggaaacgatgaaagccggccctggggccggctttttttctttccaggggcaggaccccggcgttcccgcgaagccacattcctgcaggttcagtggcgtgaaatcagtgggtgatggtgatcgaacgctggatccgccagtggccatcgacgcgttcccacagctgcgctacacctgcccgggccagcgcagcatgcgggctgccgccatggtcgcctgccagttgctggctgcccaggcgcagcacgcggtcctggcgcaggtgatagagctgcaggggcagcgcttcatgcgtgtccttcggtccttcggtgcgcaggatctggctgcgcagggcatcctcggtgggcccgctgccgtcgccgaacaggctggagaacagcaggaccagggcaagcatcggcatggcacggtgctccagcgggaaagtgcgtgcaggctggcatggccggccgggcaccgcagccggcctgcgacgaagacggggattgcgccgccaaaggcgggcaggcggcgatgaatccgggacgcgcaggtgtagactcggcgctaccgcgcaaccgcgccgtcacttcagcgagctgccgcatgagcgatcacgtcccggtgtccaggcccaatccgtttctggaacgcctgttcggcggcaacatgctggaaggcacgttcaaggcagtgatctgggtggcgatcctgtgcgcgctgctggcgtggaccacgctgcgctgagcgacgctaccgcgtgggcttggctgctgatgcagtgaatacgggtgccgcggcaagggtgcggcggcagtgtccgtgcatgtgccgtcaggcgctgaaggcctggcgcaggctgcgcagggttgcctggcggtgctccctggccgtcggctcgcccatctccagttcctgcaggcgcagtccaaccagggtcatcgacaacgcatagccgcgtgccgcgtccgcaacgcgtgacaggcccactgcacggcgtgccagtgcattcacatgttcgaggtcgggcatcagtcccagatagacgcgctcggcgctgtccaggtcgggcgcgcgcaggatcgcgtgggcttcggtggcggaggagacggaggccatgggggtccttgtccgtaggggggcgctcgctcacaacgagcgcatcagggaaacgaaggccgacgtctgcgtgccacgtcgtgccatcgggctgtccttcactgcatcaccgaaccactggttggccaccacgccggtggcgcgccatttggtgcccagtggcgtgctgaccgcgatctgcaggctcggcgacgtggtgctgccggggcggtagacggcaaggcccgagcgcagggcttcttcatcgctgatgccgtagtagtagtcgagcagccgtgcactggagtgcaccacgcccgcccgcggcacccaggtgaagcgacccgcctggatcgggtagctgtaatgcaggtgcgactcgaaaccgccgccatggccggtcacttcgcgcatcacgctggcctcgaccatgccccagtcggcactgtactcgccgttgatgccggccatggccgacatctgccggctgtgcaggcggcgcagctgagcatcgttcacgtcgtcggtcttgaagcgcagcgtgtagggcgtgaccgccgccgacaggcgcagtccctggcccttgtagaggtacatgcccagcgagccggggctggcgaagaagcgctcgccctgccaggcaatggccggtaccaccagcggtttgacgtcgtagtgcgcgtacgcaccggaggtcgcgccagcgctgatgccggcctgtacgcccgggttctgctcggcagcgtgggcgagcaacggcacgccgagggcagcggtgaacagcagcgggcgcagcagggtcggggacagcgacggcatcgatcagccacgttgcggaggatggctgcgcatggtgagggggcaacattgtcagaacattgcgcccgcgtgatcggcacgcatgggcgcaaaaccctggcgccaggcactatgatcggcagcgtttccggcagacgagttcctgatgcgcatcctcctggtcgaagacgatcctgatctgtcccgcgccctgcaatcgggcctggagcggcagggcgtggtcgccgacgtggtcggcagcctggccgaggccgcgctcgcgttgcgcgaaccggtgcaccagctgctgctgctcgatcgccagctgcccgatggcgatggcgccggattcgtcgcgacggcgcgtgcgctgcggccgaacctggcggtgatcatgctgaccgccaagggcacgctgtcggacaaggtcgaaggcctggacgtcggtgccgacgactatctggtcaagccggtggcgatcgaggaactgatggcgcgcatccgcgcggtatcgcgcaggccttcggcgatggtgacaccgagcctgcggctggggcggctcgagttcgatttcgaatcgctgcaggcgcaggtggagggccagcctctggcgctgccacgtcggcaggtactggtgctgcaggcattggcgatgcggcaggggcgcacggtcacccgcagtgcgttggaggctgcggtgtacggtttcgacgatgagatccagtccaatgcgctcgacgcgcacatctccaagctgcgcaaggcactgcagcaggccggtgccggcgtcgagatccacgtgatacggggcgtcggctacctgctggcggaggcctgagatggcccgtccgatccgttcgatcacccttggcctggcctggcgcctgttcctggcgcaggccttcaccgtactgttcgcggtggtcgcgctgatcctgacctggggtgacaaggactcctggggcatggacatgttcgttgccgaggcggtggccaaggcggtgcacagcgaagacggccgcctggtgctggaccaggcgcgctgggacaagctcgatgccaacgccgggggaaatctctggttcgccgcggtggatgacaagggcatgtggctcgagcgcggcaccatccccgcgatccacgcgccgatgctcgcgcggctgcccaccgtgggtgccaccgagctgggttcgctggtaccgccctacctggacgtggcgcgggtgatgatccgcaacgaggatgggcgccgcatcaccgtgatggtcggtggagcacccaagggcgggctgctggacggtgcgctgatggtgctgcgcctgatcggcctgtggttcttcctgccactgatcgtggtcaccctgctggtgatgccgaccgtgatccaccgtgccatgcgcggtgtgcgccgttccgcgcagcaggccaaggagctggacatcggccagcccggtgcgcggctggatgcgcggctggtctccacggaagtggcgccgctggtggaagcgttcaacgatgccatcgacaaggtgcagcagggctacgccgcgcgcgacaagttccttgccgacgcagcgcacgagctgcgcgtgccgatcgccgtggtgcaggcgcgcctgtcgcagctgccgcagggcgagctgaaatcgcagttgctgaccgacgtggcgcggctgggcaatgttgccgagcacctgcttgatctgcagcggcttgaccgcaatgtcggcgcattgcagcggctggacctggccctgctggtgcgtgaggcagccgcggacctggcgccgttggtggtgggcgccggctatggattcgaagtggacgcgccggaagcgccggtgtggatccacggtgacagcctggcgctggggcgggtgattgccaatctggtacacaacgcgatcgtgcatggtggtggccgtggcaccatctgtgtgcggttggacacgcgcgggttgctggaagtcagcgaccagggcgcgggcattccagtaggcgaccgcgaggcgatcttcgagccgttccatcgcctgcgcgcggcgggcagcggcagtggccttggcctgcacctggtgaaggagatcgtgcagcaccatggcggctcggtcagtgtcggtgaggccgcgggcggcggcgcaagcttccgggtcaatttccatcgcggcagcgcgcggcgctgacgcgtttgcggggcaagtcccgataggcaacctgccgccggcagcggcaggctggcctcatggccatcgagcgctccccgtctcccttgctgggcagtggcaccgctggggcgctcacactgggggcgttgggctgcgtgcagctgtcgcagctgccgccgctgtgggtctgcacggtgatgatcgtgcttggcatggccgggtggggcctgcgatggcgggggcgcctgccggcggtcatgctgctcggtgccggatggacgtcgatgcacgggcactgggcaatgcaggaccagctgccaccgggccaaccggctcgggatgtagtggtcagtggccgggtcatcgatctgccggatcatcgggccgcgcacacccgcttcctgttgcaggtcagcgagagccgcgaactgccatcgctgcgcggcaagcgcctgcaggtcacctggaacgacggctggcaaggcaggtccagcgccgctgccgaggggcggcgcaggcaggtcctggccggtgcgcagtggcagctggcgctgcgtgtgcgggcccctcgctcgcggatcaatcccgggggttttgacagtgagcgtcatgcgctgctgcgtggcgtagccggcactggaacggtgaggtcgccggccagcgcgcgtgagctgcaggccggacatggcctgccggcatggcgtgagcgcaccagcgccgccatcgcgctgcaagtggcccatccggccgcccgtttcgtgcaggcgctcgccctgggcgacacgcgtggcctgtccgacaccgattgggatcagctgcgggcgctggggctgacccatctggtggccatttccggatttcatgtcggggtggtggcggggctgggggcgttgctgtgccgagggctgtggtggctgtgccccctgctggcccggcattggccacgtccacaggcggcggcctgcgccgcggcgctgtccgcagcgggctatgcggtgctggccggtggtgagttgccgaccttgcgcacggcactgatgatcgggctggtggccctggcgcgcagcgggcggcgcccgctcggtctcgtgcaggggcttgcgctggcggcgctggcgctgctgctgccggcgcccctgtcggtgctgtcagcgggcttctggctcagcttcggcggcgtactgtggctggtgtggtgcttgccgcagggacgtccgcgcggggtggccgccaacctgcgcgggttcctggccgcacaaggggtggccagcgtcggcctgttgccgctgggcatcgccttgttcggtggcaccgcctggctggggccgctggtgaacctgccggtcatcccgtggtggacattgctggtggtgcccctgtcgctgctgggcaccgccctgcaggcgctgcacgacggcgctgggcgctgggcgtggcgcgcggcggcgtggctgttcgagatcagctggcaggccctgcagccactggcggcgcacccgcaggcgatgtggtggctggccgaggcgccggcctgggcggtgccggcggcgctgctgggggtgttctggtggctgcttaccacgggggccgggggctggctggctggcctgctgctgtgcctgccgctgctgtggccggcgcgtgagcgcccggccgagggagagctggagctgctggtgcatgacgtcggccagggcacggcggtgttgctgcgtactgcgcggcatgccctctggtatgacgtggggccgccgaacgggggcgagggcagcgagcggatcctggttccgtcactgcgggccctgggccaggcgccgcccgagcgggtgctgctcagccacgacgatctcgatcatgccggcaacctgccgagcctgcgtcttcagctgccggggctgccattgctggcgccgccgggaagtacgatcgccggggccggccgttgccagcgcggcctgcgctggcactgggatggcgtcgatttccaggtgctgcacccggatgccggcagccagcgggccgaaaacgaagacagctgcgtgctgcgcgtggccggtgcccatggcgtggtcctgttgccgggggacatcggccgtccggccgaacaggcgctgttgcgggcgtctgcggcggcgctgaaggcggatgtggtgctggtgccgcaccatggcagtggcggcagctccagcgcgccctgggtggcggcggtgtcagcccggctggcattggtctcggccggccaccagaaccgtttcggccacccgcgcaaggacgtggtccggcgctggcaggcgcagggcgccgaggtggtgtccactgcggagtccggggcgatccgcgtatggcttggcgcacaagggctgcagctgcgtgaacagcgcatccatgcatcccggtggtgggatgccgctgggcgggcgcggtcggctgctatcctatcgccgatcgaacaagcggccgttgggccggagggttgaaacgtgtgggaactggtcaaggccggtggctggccgatggtgccgctgctgctgttgggcgtactggctttggcgatcatcctggagcgtttctggtccctgcggcgaacggaggtgctgccgcccggcctcggccaggaagtgcgcaactgggccgcgcgcggcaagcttgacccggcgcacctgcagaccctgcgtgccaactcgccgttgggcgcgctgctggcggccgcgctggaagcccgcaaccgcccgcgcgaccagatccgcgagcgcatcgaggataccggccgtcacctggtgcaccgcatggagcggttcctcaacgcgctgggcaccatcgcttcggccggcccgctgttgggcctgctgggcaccgtgatcggcatgatccagatgttcctgggcatcctcgaccatggcgtgggtgatgtgaaccagctggccggtggcatcggcaaggccctggtgtgcaccgccaccggcatgatcgtggccatcccggcactgatgttccatcgctacttcaagggccgcatccacggctacgtggtggagatggaacaggaggccagcgccctgctggatacgctcgacggccgcccgggggtgatgaacccgtccccgtcggcgcgcccggccaacgccgctgcggcgaaggcctgatcgatgcgtatcggcaatgaccgatcccaggatgagccgcatatcgatctggtcccgctgatcgacgtcatcctggtgctgatcatcttcttcgtggtcaccaccaccttcgatgcgcgctcgacgttgcaggtgcagctgcccaccgccagccagcagcccaacaacgaaccgccgcgttcgctcagcgtgctgatcaacgccgaaggccgttatttcatcaatgaccaggaagtgctgcgcagcgatgtcgagtccgtcaagcagaccatcgccgccgtcgccggcagtgatcgcagccagcccgtgctgctgcgcgccgacgcgcgtactccctaccaggccgtggtgactgcgcaggacgcgctcggtcagctcggtttccgtcgtatcgccattgcaactgcgccagaggtgcgtccatgagttcccatcacgcgccggtgtggccgatctacaaacgtctgctgggctacacccgcacctactgggtgttcatggtcggcgcggtcatcgccatggtggtcgaagccctcgccggctaccacttcaccaagctgatggagccgctggtcaacgaaggtttcgtcgatccgcagccgcgcgcggccgtggtgctgccgctgaccatcctcggcctgttcctgatgcgcagcctggccacctgggtcagcgactacacgctggccaagaccggccgcagcgtggtccgcgacctgcgtgagcaggtgctgcagaagtacctgcacctgccgtcgtcgcacttcgataccgaagcgacgccggtaatggtcagccgcctcaacttcgatacggaacaggtcacccaggccagtgccgacgcgctgaagaccgtggtcgccgataccctcaccatcatcgcgatgctggcggtgatgctgcagatgagcgtcaaggtgaccctggcgatgctgctggtggtgccgctgatcggcggcatcgtgtcctacgtgggcaagcgctaccgtcgcatcagccgcggcatccaggacggcatgggcacgatggcgcagactgccgagcagtcgctggccgcgcagcaggaagtgaaggtgcacggcacccagcagcatgagatctcgcgctactcgcgcctggccaaccgcatgctggcgctgaacatgaaggtcgaggtcacccgcgccgccgcgtccagcgtggtgcagttcctggccgcactggcgctggcggtgatcgtctgggtgtcgacccgcgaagccctggccggccgcctcaatgccggccagttcatgggcctgatgacctcgatgatggccatcattccctcgctgcgccgactgaccagcgtacagacctcgatttcgcgcggcgtctccgccgccgagcgcctgttcggcatcctcgacatgccggtggagcgtgatgagggccagcaccgcgtgcagcgcgtgcgcggcgaactggcgttcgaccacgtcatgctgcgctaccgcgaagacagcggcattgctctggacgacatcagtttcgttgccaggccgggcacggtgacggccatcgtcggccgttccggcagcggcaagaccagcctgatccggctggttccgcgcttctacgagcccagtggcggcgtcatcaccctcgatggcgtggccctggatgactatccgctggccgacctgcgccggcaggtggcgatcgtcgggcagaaggtgatgctgttcgatgacaccatcgcggccaacatcgcctacggcatggaggcgaccgatgagcagatccgtgcggcggccgaagcggccaatgcctgggagttcatcgcacgcatgccgcagcagctgcagaccccggtcggcgagaatggcgcgctgctgtccggtggccagcgccagcgcctggcgattgcccgcgcgatcctgcgcgacgcgccgatcctgatcctcgacgaagccactgcggcgctggacaacgaatccgagcgcctggtgcaggatgcgctgcagcgcctgatgccggaacgcaccacgctggtcatcgcgcaccgcctgtcgaccatcgagcatgccgaccaggtgctggtgatggaccatggccgcatcgttgaacgtggcacccacaaggagctgctcgaactgggcggcctttaccagcatctgcacagcatgcagttccgcgaaaggcaggactgatggccggcaagggtacccagaccccggcgtactggtacgacggcagccccgttccgtggacgatgcgcctgctggcgccgctgtacgcaggtgtcaccgcactgcgccggcgcgcctatcggcgtggctggcgcaagcgccactcgctgccggtgccggtcatcgtggtcggcaacatcaccgccggtggtaccggcaagacgccgctgaccattgccctggtcgagcgcctgcgcgcggccggctggaagccgggcgtggccagccgtggttatggtcgcgaagacgccggcaagccgctgtgggtgcaggccgatacgccaactgccaagggcggtgacgagccggtgctgatcgcctggaagaccggtgtgccggtgcgcgtggaccgcgaccgtgtcgccgccggcaaggcgctgatcgaggccggctgcgatgtgatcgtctgcgacgatggcctgcagcactaccgcctggcgcgcgatatcgagatcgaagtggtcgatgcgcagcgtcgctacggcaatggccggatgattccggccgggccgttgcgcgagccggtcagccgcgccagcgaatgtgatttccgggtggtcaacctcggccaggccgatgaggaaaccgcagcgcaggcctgtggcttcggccagtggccgatggcgctgcacatcgacagtgcacagccgctggccggtggccgcgctcgcccgctggcgtacttcaagggccagcgcgtgcatgcggtggccggcattgcccatccccagcgcttcttcgacatgttgcgcgcgcgcgggatcggcgtggtgccgcatgcgttcgccgaccaccaggcctaccagccgcaggacctgtccttcggcagccagctgccggtattgatgaccgagaaggacgcggtgaaatgccgtgcgttcggcaacgactggcactacgcggttccgttgcgcgccgagttgcccgcggcgttctgggtggcgctgaccgatcgcctggacaagctgcggccgaactgagtggcgcggcggcgcttgcattcacgcgctgctgcccgcattcccgttgtaacgagcctgccgagtaccgcctgcatgactgaattcgtcgtcgccattccggcccgctatgccgcctcgcggctgccgggcaagccgttgcgcccgctgggcggcgagccgctggtgctgcatgtggcgcgccgcgcgctgcaggccggtgcccgtgaagtctgggtagcgaccgacgatcagcgcattgccgatgcgctgtccgggctggccgaagtgaaggtggcgatgaccgcgaccacgcacgcctccggcactgatcgcctggccgaatgcgcacgcattgcaggctgggccgatgacacggtggtggtcaacctgcagggcgacgaaccgttcgcaccggcggccggtatccgtgcggtggccgatgcgctggtcgcaggcactgcgacgatgtcgactctcgccacgaccgtcgaggacgcgcacaccctgttcgacccgaacgtggtgaagctggtgcgcaacgtgcgcaacgaggcgatgtacttcagccgcgcgccgatcgcctggcaccgcgacggcttcgcacgcagccgcgacacgctgccggacggccaccactggttgcgccacatcggcatctacggctatcgcgccggcttcctgcagcagttcgcggcgatgccgccgggccagctggagcaggtcgaatcgctggagcagctgcgcgtgctggaagcaggctatccgatcagcgtggcgatctcgcccgagccgttcccgccgggcatcgacacgcccgaggacctggagcgcgccgaggggctgctgcaggcgatggcgccgcgatgaggctgctggtcgtctgcctcggcaacatctgccgttcgccgatggccgaaggcgcgctgcgcgcacgcctggatgcctcgccgctggccgggcgggtgcaggttgattcggctggcaccggcgactggcatgtgggcgagccgccggaccgccgcgcgatcgcctgcgcggccgggcacggcgtggacatcggcggcctgcgcgcacgccagctgcaggccgtggatttcgaccgtttcgactggatcctgtgtgccgacgaggccaacctgcgtgatgcagggcgcctggcgtcggcggcccagcgtgaacggctggcgttgtacctgccctggtcgggcgttcaggggcgggtagccatccccgacccctataccggcggcagcgatcatttcgagcaggtctggtcgctggtcgacgatgctgcaaaacgtgcggtggcacgactgttgcatgacgccgactccggcataatcgggtcatgaacgtccagcccgtcccggacctgcccgagttcgccacctggctcaatgccaccccctgcaccctgaccgaactgcgcggccggccggtcgcgctgctgttcgtcaatgcggcctccgcctggagcgcgcaacgcctggccgagttcggccaatggctgtcgcgccaccccggcaagctgcagccgctggtgctgcaggtgccgcgcttcgatttcgagcgcgacgccagtgccgcactgaagctgctgcgccgccagggtctggccatgcccgtactgctcgatgccgattgggatggctggcgccgcttcggcgttaccgcctggccgaccgtggtgctgctggacgcgcagggtcgcgagcagcagcggctggtcgggcagggagcacccggtgaactggagcgcgccctgaacacgctgtgccagggcgcgccttcggcgccgccgcgcggcggcagcgaactgcatccggaaccacgccaggcgctgcggttcccgctgggcctggcggtcagcaccgaacgcctgtacatcgccgacagtggccaccaccgcattctcgaatgcagccatggcggccgcatcctgcgccagttcggcctcggtaccgccgatttcatggacggcaacctggccgaagcggcgttccaccgcccgcaggcgctggtgctggagcgcgattcgctgtacgtcgccgacaccggcaaccatgcggtgcgccgcatcaacctgctgaccggcatcgtcgacacgctgtgtggcaacggacgtcccggtgcgccgatggaaggtccggtggcgcaggcgcggcaggtctcgctggaccatcctgtcggcctggccatcgccgacaaccagctgcacatcgcgatggccggcgacaaccgcatctggagctaccacctgggccagcgcagcctgcaatggcgcgccggcagtggttccatcgacgagcgtgacggcagcggccacctggctgcctttgcccaaccgactgcgctggccgtggtgcagcaggtgttgtacgtcgccgacgccttgggatcctcgatccgtgcactgcaactgcgcggcgacctggtgcagacgctggtcgggcaggggccctggcgcttcggcagcgaagacggcccgcgtgcgcaggccagcctgcagtatccgcaggcgatcgcattgagcgcggacgctccgctgctgtggattgccgataccggcaacggtcgcctgcgcacgctgcgcctgggcggcggtgaactgaccacccagccgctgccgcgccgcctgcatggcccggccggattggcggtgggcgccggtgcggtgtggatcgccgagactgacgcccatgccgtgctgcgattcgaccccgacagcggcgtgctcagcgaagtcccgatcagcgaatgaccgacgttcccgccccggccttcgacggcaaggccttcgcggcccagctcagcaccgcccctggcgtgtaccgcatgtacgccgccgacgacaccctgctgtacgtgggcaaggcgcgcgcgctgcgcaaccgtgtcggcagctatttcaacggcagcccgaagaacgcgcggatcatgtcgatgatctcgcagatcacgcgcatggacgtgaccgtgacgcgctcggaagccgaggcgttgctgctggaaaaccagctgatcaaatcgctgtcgccgcgctacaacgtctcactgcgcgatgacaagacctatccgcatgtgctgctgacccgcgaggactggccacgcatcgcgctgcatcgtggcccgcgtgccattcctgggcgctacttcgggccgtatcccggcgtcaccgccgtgcgcgagacgctgaacctgatgcacaagctgttcaagctgcgcagctgcgaggacagcgtgttccgcaaccgctcgcggccgtgcctgcaataccagatcgggcgttgcagcgcgccgtgcgtggagctggtcccggcgccggagtacgccgagtcggtgcgccgcgccgccctgttcctggaaggcaagagtgacgagctgacccgcgaactgggcgagcagatgcaggccgccagcgaggcgctggagttcgagcaggccgcgcgcctgcgcgacctgatctcctcgctgcgcagcatgcagacccgccagtacgtggatggccgcgccgcggacctcgatgtgctggccgtggccatgcagggctcgcaggcctgcgtgctgctgctggccttccgtgatggccgcaacctcggtacccgcccgttcttcccgcgcaccaatggcgaggaaagcccggaggaagtgctggcggccttcgtttcgcagtactacatcgaattcgagccaccgcgcgaaatcctgctggatcgcgagattcccgacgccgacctgctggtcgccgcgctgtcggcctcggccgagcgcaaggtgcagctgaagtggaacgtgcgcggcgagcgcgccggctatgtggaactggccagccgcaacgcgcagctgaccctggccaccgaactcaacagccgcaatgcgcagcacgcgcgcagcgatgcgctgcgcgagatgctgggcctggccgagccggtcaagcgtgtcgagtgttttgatatcagccacaccctgggcgaggccaccgtagcctcgtgcgtggtgttcgacgccgccggcccggtgcgcgcgcagtaccgccgcttcaacatcagcggcatcgagccgggcgacgactacgccgccatgcgccaggccatcgaccgccgtttccgccgcgcagtggaagagcagggcgtgctgccggacgtgctgctgatcgacggtggcgccggccagctgtcgcaggcccaggccgcactggccgatctgggcgtggaaggcgtgctgctggtgggcgtggccaagggcgtggagcgccgtgccggccacgaagcgctggtgatgcccgatggccgcgagctgcgcccgggcgcggccagcccggcgctgcagttcatccagcaggtgcgcgacgaggcgcatcgcttcgccatcaccggccacagggggcgccgccagaaggcgcggatgaccagcaagctggaggatatccccggcatcgggccgcgccgccgcgccagcctgctcaagcatttcggcggcctggtgggcctgaaagccgctggcgaagccgagatcgccaaggtggaaggcatcaatgacgccctcgcggcacgtatctacgctaacctgcacgggttggccacgcctgatgcggccgagtagagagagaagcacgcaagcatgaagttgaccctgcccacctggctgacgttgttgcggatcgtgatgatcccggtgctggtgctggtgttctacctgccctacacctggaccaacttcgcttcggcggcgatcttcggcctggccgcgatcaccgactggcttgatggctggatcgcacgccgttaccagctggagtcggcctttggcgccttcctcgacccggtcgcggacaagctgatggtggcggtggcgctgttcctgatcgtgcagggtcatccgacgccgtggatggcgttctgggcggcggtcatcgtcggccgcgagatcgcggtgtcggcgctgcgcgaatggatggccgagctgggccagcgcgcgaaggtgcgcgtggcgatgatcggcaaggtcaagaccaccgcgcagatggtcgcgctgttgtgcctgctgtattcggtggccccgaacgtgccggtggaagacatctggatgggctggccggtgttccatatcggcgactggactctggccattgccgccgtgctgaccctgtggtcgggcctgcagtacctgcacgccgcgtggccgagcctgcgcgacgatgagcgcgctgcgcgcgagcgtgcgcggcagaagaagctgggcaactgagcccggggtctgagccccggggtcggatccctttccgaaggaaagggctctgaccccatcgatgcgcctatccccgcatggcgtggacctactggaaatgctgcgtccacggatggtgcggatccatcggtttgcggggatgccgtggtagatccacgccatgcatggatacgcgatgcaaggcgcctcgcaggccccggaaaaaccgcttgacgccatccttggaacaggtaaaatttcgcctcccaagcgggaatagctcagttggtagagcgcaaccttgccaaggttgaggtcgcgagttcgagtctcgtttcccgctccaatttatgatctacagacttccactgacgtctgtaagtcattgaaaagaggagcttcggctccttttttcattccagcgaaagccacggaagtccactgacagccaccatttttgaggccaaaaacaaggccaaagaatgcgggtcgtgccggttccgggttgttgctggggttggatcgggatgacaagcagcatcgggcctaagtccaagacttaggagcttgatgatgacactctctgatctgactgttggcgcgcatccagaactgacccactttcggcggtgatgcgcgggtaaaactgacccacctgaagcccacatcctgagcatcttttgctcgggggatttcaggagtgatcaccatggtcatgttggccaagatccggcggatgcatttccgcgatggcctgccgctgcgcgagatcgccaagcgcacgggcctatcccgcaataccatccggcgatggctgcgcagcggccagtccgagccggtctatcccaggcgagcctcgccctcccggctcgatccctaccggtcccagttggagacgtggctgcgtgccgacagccatcgtccccggcgggaacaacgcaccgccaaggtgctgttctcgcagttgcaggcgatcggctatccgggcacctacacccgggtgacggccttcatccgccagtggaaggcggccggcggcgccagccgccgcccggccttcgtgccgttgcactttcctccgggtgaagccttccagttcgactggagccgcgagtacgccttcgtcggcagccacgccaagatgccgctggatctcgcccacgtgaagctggcctgcagccgcgccttctggttggtggcctatcccacccagagccacgagatgctgttcgatgctcatacccaggcgtttaccgccttcggtggcgtgccgcgccgcggcatctacgacaacatgaagacggcggtggacgggatcggccagcaccgggaacggcgggtcaacgcccgcttccacgccatgatcagccactacctgttcgccgcggagttctgcaaccgcgccgcgggttgggagaaggggcgggtcgagaagaacgtgcaggaccggcgccgacagatctggatcgaggccggggcccgccactggccagatctggacaccctcaacgcctggctcgccagcgagtgccgcgccgcttggccgatgcaggcgcatccggatgcctccgacatcaccgtggccgaagctctggaggacgaacagccccacctgatgccgatgcccgcgcccttcgacggctacatcgagcggccggtgcgggtcagttcgaccgcgctggtcagcttccagcgcaaccgctacagcgtgccgtgcgaacacgcccacgccgtcgccagcctgcgcgtgtatcccttcgaactggccgtggtggtcggcgaggccgaggtcgcccgccaccggcgcagcttcgagcgtgatcgggtccactacgactggcagcactacatcgccctggtccagcgcaagccgggggcactgcgtgacggcgcgccgttcctgtccatgcccgatccgctgcgcaagctgcagcaggtgttgctgcgccagcctcacggcgaccgcgccatggcccaggtgctggccgccgtacccgtgcacgggctcgaagcggtactggtggcggtggaactggcactcgagtccggcctggtgcgcgccgaccacgtgctcaacgtgctggggcgattgcagcatccggaccgcacgatcgagacggtcgcctcgcgagtgacgctgcgtcatccgccggtgtccgatccggcccgctacgacgccctgcgggaggcagatcatgtcgacgcctgacctgccgctgcgcatgcagcagctcaagctgcacggcatggccagccagtggcccgaactgctggccaagatgcgcctgcacaccatggagcccgaacactggatggccgaactgctgcaggccgagtccgccgaacggcaggttcgtgcccaggccaaccagatgaaggccgcacgtttcctcgtccatcgtgacctgctcgggttcgacttcgcggccagtcccgttgatcgcgcactggtcgaacgactccaccagggtgacttcatccacacccccgagaacgtcgtccttgtcggtggaccgggtaccggcaagacccacctggccaccgccatcggcatccaggccgtgcgccagcatcgcctgcgcgtgcgcttcttctccaccatcgaactggtcaatgcgctggagaaggaacaggcccagggcaaggccgggcagatcgccctgcgcctgacctatgccgacctggtcatcctcgatgaactgggctacctgccgttcaccccctcaggcggcgcgctgctgttccacctgatcagcaagctctacgagcgcaccagcctcgccatcaccaccaacttggccttctccgaatggggtcaggtgttcggcgacgccaagatgaccaccgcgctgctggatcgcatcacccaccactgccacatcctggagaccggcaacgactcctggcggctgcgcaacagcaccgccgccaacaagaccaaagccagaatcagggcaaaggaggccaccacccagaccaccaactgataccctcagccccgtacaccgggtgggtcaaagttcaacgcgcagcctgggtcagttttaagtgcgcgccaacagacgttggcagcgggggagccgctgaggtggccggcgcgccattgggcgacgccccatccaacggcaataccggcagcaaccagcgtcaagccggcaaggatgtttctcgaagaggtattcatggcgagggtctccactcagtccgcgatcaggctgttcagtcgggcgacgaggctgtcgcgctgcgctccaaggtcgatcagacgcatgcgcgtctccagcacctgggcgcgtgcactgagcacagcgctcaggtcccccttggcggatcggtagttgctcaatgcaagcgccgctcggttccgtaccagttgcaagccggcggtctgcaggcggtcgatctggctgttcaacgcttggagttcggcggcgctgtcgtccagctcctgcaaatgccgccgcgccacgtcttcgcgttcggcgtccagacgttccaactcgtgccgttttgcctcgatcatgggcacttggcgtcgatccttctgccaaggcagatcgaatgtcacctgaaatgacaccatgtcgccccatcggcgatcacgccggctataggctatctcccaggcccaatcgccgcgggtctctgattgggcttcgcgggactcggcccgggccatgctttgcatcgccggatagagttcaagctccgcgtgattcgccagttctgtgcgcagttgcgcgacggggcgagtgagcgggcctggatcgccttgcagtgcttcgtcggccctggagcccacccagcgccgcaacgcggccctggccttggcccggtcccgctgtagatcgtcacggcggtccgtgagtgtcagcgcctcctgttccgcgaccaacagatcgccagcctgggcggtgccgccggcgacgcgagcggggagactgtcttgcaggcgctggttctccgcgagcagttccgtcagcagtatctcccgttgctccaccgcctgcgcggcgatccacgccaggctgagttcctggcggatctgcaatcgctgcaaaaccagcgccgcgcgttctcgatccacacgcgcctgcgcgctggcgacctgggcgtcgcgcttggccctgttgggcacttcctgcatgagcgccaagcgctgcatcgtcatggattcgcgcgtcatgctccagcgatccatgccgctgatggggtagttttcgatgccgagcgagagcttggggtcgggcagcgagcctgctgccttctgcacggattcggcgacgttaacctgcaactgctgcgcgcttatgcgtgggctctgctgctccgcgataaggcgtgcctcagcaaaatcgagggcgtaggctacaggcgagacaagcgcactgcccgccaacgcgatgctgatagctttcagacgatgcactcgcatcgaggccggcgttgtgcctcggccgtacgccgacgggcgcccctcgggggcgccaaaaaagggagtaaacatggttgtcctcggaattggtattcacgaaatcacgtggtctgccgcatcggtgcgcggcgagcacggacacataaatcaattccgcaggacttggaacgtgaggtagatcggcggaaagcccgcgcggggattgggaggaatgtaggtaacgtgccgcctgagaacgtgttcaaagtctcgccctcttgatgtgagaagctcgctgggtgagaaaaggctaccccagcgacatcaagcgcgagcagttcgaggtgatccggccattgctggagagtgcgcgcagaaagactgccccacgcaaagtggagctgtacgaggtgttctgcgccgtgctgtacctgctgcgcacgggctgtcagtggcgggcactgcccagcgactttcccaaatggcgcaccgtgcactcgtactttgccatctggagcgagccacgcgagggtggcagcctgctggagcaggcattaaaaaaatcaggttggcgcggcccgcgagaaactggggcgcaacgcctgcagcacgctcttgatcgtggacgcgcagagcgtgaagaacacggacacggcgggcttgaagggctatgacgcaggcaagaaggtctcgggcatcaagcgccacatcgcggtggacacccagggattgccgcatgcgatagcggtgaccacggccgaggtgacggaccgcaaaggcgcactgcaggcgctacagcgctgcaagccccggttgagccggctacaaagcctgctgtgcgatgcaggctacatcggtcggccgttcgcgcaaggcgtgcagcagattctgggagggcatgtgacggtgcagatcgccaagagaagcgagcttcacactttcaaagtgatgcccaagcgctgggtcgtggaacgcagctttgcctggctggacaagaacaggaggctgtggaagaactgcgagcgatggctcaacaccagcctgcagttcgtccacttggcattcttggtgctcttgctcaaaagactttgaacacgctctgagggctacccggtcgagaaccaacccgggcagcgagttggcgagccacatcacgtgcgccgcgagaaactgaatgtccagcccctgccatgaaagcgccgactcccgatcgccactgcaatgagcgtggcacaactgtggcgcttcgctgtccatggaatcaggcatgccggtgcaatccgacattggcaacttgtcagcctgctgcatcgagatcgtggcacgcatttgcgtggtttccacagatgccctcgggtctggcttgggacagacgtacatcgccatcgcaacctgcgagaaaagcaaggttacgactaggccgctggtaatccagcggctccatcttgcgagaaggcgccttaagccgatcatgcggacatactattggaagttgtagggagttgaattgatcaaggtcagtttccaggatgaattgatgcgtctggacggcgccttggcccgaaccggcacccgctgcaaatccaccggcaagggcgggcaccgcacgtggttgtcatgctttacgcgcctcggcaactcgcaaggctctaagctcaaatcgatcagctacaagattcgtctgtcccgagagtcgctgcaggtgcgtaatgacctcgtaggggccatcggctattgggcgcgtgcagattccgtgacctgccccctttctcagggccactagctacttagtagagtccaggttggggagcataccgctccggtgggtcaggtttcgatcagcggtcgaaccagtcaaggcaccttcgttgcgcagcgcggcggcgaactcggcaggcgtgcatttgggcagtgagctgtgcggacgcacctcgttgtagtccttgcgccagatggcgattaccgcccgtgcgtgctcgagcgagataaaccagttttcgttcaagcattcgtcccggaacttgccgttgaagctctccacataggcgttctgcgtgggtttccctggctgggtcagcacaagcgtcacgccgttggcggtcgcccactggtccagcgcccggccggtaaactcgggtccctggtcggtcctgatcgccgcggggtagccgcggaaacggcataccgcatccaggatgtcggccacgttctggccatttatcctccggccgacggcgatttccaccgcttccttggtgcaatcgtccaccaccgtcaggcacttgatcgggcgcccgttggccagggcgtcgaagacgaagtccatcgaccaggtgtggttgggccccgacggcagctgcagcggacggcgctcgacggccacgcgatcgcgcttgcggcgcttgcgcaccgccaggccagcgttgcggtacagccggtagattcgcttgtggttggcgatccagccctcccgttccagcaggatgtgcagccgtcggtagccgaaccggcgacgttcgcccgccaacgcaacgagcctggcctgcaacggcgcgttcgccatgcgcggctggtagtgcaacacgctgcgtgacaagcccagtgcccggcaggcccgccgctccgacaggcccagcttcgcccgcacgtccgcgacggcagcccgtcgcgtcggcgggctcagtattttccccgcgccacgatcctcagcgcttcgttgtccaacatcgactcggccaacagctttttgagccgcgcgttctccgcttccagtgccttcaggcgcttggcgtcgggcacatccatgccgccgaacttgcgccgccacaggtagaacgacgcgtcactgaagccgtgcttgcggcaaagctccttgaccggcgtgccggcggccgcctgcttcaggaagccgatgatctgctcttcggtgtatcgcttcttcatgtccgtcctcttgtgagacggactctactaagatcaggttggcccggaaaacggggggcaggtcacgacgtcgaagtgaaccgccccggtttttgaggaggctcaacactctgagaggattgagccatgagcaagtcgaacaagttctcgcccgaggtgcgcgagcgcgcggtgaggatggtgcaggagcagcgtggggagtacccgtcgttgtgggcggccatcgagtccatctcccccaagattggctgcgtgccgcagaccttgaacgaatgggtcaagcgcgccgaggtcgacgccggcatgcgtgaaggcgtgacgagcagcgaagcacagcggatgaaggagctcgagcgtgaggtcaaggaactgcgccgggccaacgagatactgaagctggccagcgcgtttttcgcccaggcggagctcgaccgccgcctgaagtcgtgaagaccttcatcgaccagcatcgcaacgccttcggggtcgagccgctctgcaaggtgttgcaggttgccccgtcggcctaccggcgccatgccgcgctgctgcgcgagccccacaggcgctgtgcccgcgccaaacgcgacgagctgctgatgccgcagattgagcgcgtctggcaggccaacatgcaggtctacggtgccgacaaggtgtggcggcaactggcgcgcgaaggcactgccgtggctcgctgcacggtcgagcggctgatgcgcagcatgggactgcgcggcgtgatgcgcggcaaggtcgtgcgcaccaccatcagcgatgccaaggccgcgtgcccgctggaccgggtcaaccggcagttccgtgcggagcggccgaaccagctgtgggtcagcgacttcacctacgtccccacctggcagggctggctgtacgtggccttcgtcatcgacgtgttcgcccggcgcatcgtgggctggcgggtgagcagttcgatgcgcacggacctcgtgctcgacgcgctggagcaagccctgtacgcccgccagcccgagcgcgatggcagcttggtctgccactccgacaggggctcgcaatacgtcagcatccgctacaccgagcggctggccgaggccggcatcgagccgtccgtgggtagcaagggcgacagctacgacaacgcactggccgagaccatcaatggcctgtacaaggccgagctgattcaccgccgggcgccctggaaaaccagggaggccgtcgagttcgccacgctggagtgggtgtcctggttcaaccatcaacgcctgctcgaacccatcggctacatcccgccggccgaggccgaggcaaactactaccggcaactcgccagtcagaccaccacggtggcgggctgacttaaaccaaacagcctccgcggaaaccggggcggttcaaagcgccgtttgtagaggcccgtaatgagatcgctcgccgtaacctcattaaattccatagaaacttcgggctcctccgcgcgctgcagggcaagcaatgcagctaggtacgaagaggccacaccaggcgctatggcgagcctgagctgtgggcgtgggctggtggcgtcgtgcatgagaggccccaagaagcgataagacaaggatggaaagtcttcatgatagctagtttgagttaaacttaacgtggttaaattgtttggactgttcgacgcttccaaggatggagaagcgaactgtccgacgaggccgtcccccaggaactaccactttcgacgccgagccagcgttggcattcggagcggccgttcgtgtcgcccgcctgacgcaaggtgttgctcaggaagaactggctgcgaaagcagggatcgagcgatcgcacatgggcaaaatagagcgtggggagcacatgcccactctcgctctgatcttaagaatcgccgccggactcaagctcagtgctgcggaactcgtcagcgcagccgaacgcaatcttcgtgccgcggcgcacgattcagataggcattgacgctttagtcacccggaggtcctcgcagacgttcgatgaagcgatccagcgaaaccgatgagttgctgctttctggccgaagcagataggttgtgattaccgccgtgtcctgcgccagagggcgaatcaccacgtccggcctctggctgatgggaatcttggtcgccgtcatgaaaccaatcccatagcctgcgccgacgagcgttagcatcatgtccagcgacgacacttcttcgacaacgttgagtctgtgttccagaacctgtagcagccgatttagttctcggcagtagccttcgcaggccagtttgtcgcacagaaccagtgggtgaccctgaagttcgttcagcggaacttgcttgtgcgcaagaagcgagtgccgcgctggcatggcgatcacaatcgggtctcgccagatcggttcagccacgatgccttcgccaacatccgccgcgtgtgcaaatccgatcgtgaagtcgccagaccgtaggccccgtatctgctcggtcagcggtacctcggagagacgtatctcgacctcgggctcttccgcgcggcaacgagctaggaacgccgatagtcgtgggtccatcgcaccatcggaaattgcaatgcgcaggctgcccctcaggcccgcggcaatggctctggcattttcacgcgcttgctccaggacagtgaagagtcggcgggtgtcctgcaagaatgccgcccccgccacggtcagccgtgtgcccctgcggtcgcggtcaaacagcgtgaccccaagctcatcttccaattccttgatcgcgcgagacaaggggggttgctctatatgcagcctctcggccgcccgcgtgaaatgcaactcctctgccaagacgacaaagcatcgtagatgacgcaactccataaatcgggctcctcgcaagtcctcattcgcgccagatgtcccgtggacgaatcacggtggacggggaggctggatccatttcagggaagttgatgcgcttgacatcgcaaaaactggcaccttgagcgctcgtggttgctcgtgacgcgtcccaagcgcgcgcgcccaatcggggcgcgcgtctctgtcacactgtgcagaagctttgaaaagcaccgcacacccgcggcgtcatccgccgtgctctttttgtagcagcgacccgaggcgagcgacttcattgctggtgatcgcgatgttgcgcccatccttcgtcgacaccgaagctccgacattgagatagacggcgcgcccgaagcggctttcctgtgccatctttccgtccttgaagatgtacagcgttcccccgtcagccaagggaaccatttccttggctgcttgggctgctgcatgaccggcgaaggctggcacggagagagcgctcaacagggcggcaatgacaatttgcgatttcatgatcgactcctttgtaaaaacgacgacaacttgcgccgcgtcgttaaatgtagaagcaggcggtctacagagcgcttacccgtgcattacattcaattcatgtgctgtcatctgccgcccatgaaggactaggttccagtgggagacaagatgccaagccatgcaacgctcgccagaaccaaaacggccaaggtcgcctccgtgaacagactctgtctaagcttgatgactgcctgtgcgcgattgcctgccttcaaagcagcctccaggctcgggctcaaccgataccgattggcagcagccaacgccagcatgcctgcgaaaagcaagagctttaccatcagcagccggccatacagcgtcgagatgagcggatcaaacgatggtccggcgatcaacaggtaattgagaattccactcacgacgagtgcagccacgatcgctgtacctatgcgagtaaagccattcgacgtccgactgaggaccgctaccgggtcttgcgcgacatcctgcttgtgggatgccagcatcaagaacgccaccaatgcgcccacccaagcgcccgctgcccagaggtgcgtgatatccgacgcaagatggatgtagccgcgaacgccgtcgtccatcgcgccgtggcctgcccacgcaagggtcgccagcgccacgccggtggagagcgccatcactgcaaatcgcaaggtagcgttcaatttcaacattgcgacgagcacacacaccaacagcgcgaggatgcgaatgcaccaggcgatgcccatgtgcgtgcccgtaatgagcatgtcgaagacgtgcgttgacagctccgcgtagctctgggcaccggacatggccttggccatgaccgtcatgccccacatcgacagggcaatgccgatggcagcggatgcgccaatgaggacgcgatagcggcgcgagatcgtcgaggatcgctcgtcgttgcccaaagcatagagaccgaacatggcgacgccaaacgccgccgccaggtccagatacagcgccaggcgcaggacgatggtcaaccaatccccggccatgggcttacttcaccttgaaggtgacgttacccgtgatcggatgcgtgtccgaggagacggcacgccattcgacgcgatagtcaccgggctggagcgcctgtgccggcgtgatgaccatggtcttgccgtcgccggcagccgcgacgctggcgttgatcttcatcgggccatggctcgccattcccggcatgccagtcatgacaaggctcgcggcggagaactgcggcaccagcgtctcggagaacttcagttcgatggtggctggcgcagaaacctgcgacttgtcggccggcgttgaagacaccagcgaaggatgcgcgaatgcggcggtggcgaacagaccagcagcgatcggcgcgacgagcttggcgatgaaatgtgaacgggtcatagaagtttctacctggatgtgtgaggtgtggtttaagaacgaaatgccgagataaggcttgcacctttgcaacggcgtggaacgaaagaaacggtttgctgggcgatagcaggctcctgtagtttcagaaagaaaatccggtcacagtcggctcgctctcaggcgcaaggcgttgccaacgaccgacgccgaactcaggctcatcgccaatgctgcgatcagcggcgacagcagccagcccgtgaggggatagagaaccccggcggcgatggggatgcccagcgcgttgtagaggaaggcgaacatgaggttctgcttcatgttgcgcacggtactcaccgagagcgtgcgagcgacagcgatgccacgcaggtcacccttgaccagcgtgacctgggcgctgttcatcgccacgtcggttcccgttcccatggcgatgcccacgtctgccttcgccaaggccggcgcgtcgttgatgccgtctccggccatggcgacgatgcgtccttctttctgcagtcgctcgatcaacatgagcttgtccgccggcttgacctcaccatgcacctcgtcgatgcctaggcgtgcaccgacggctttggcggtggtctgcccgtccccggtggccatgatgacccgcaggcccgcagccttcaacgcggccagggcctcgggggtgctgcccttgaccggatcggacacggcgagcaagcccgcgagctgcccgtccaccgccaggtacatgacgctggccccttcgccgcgcagagcttcggcctggggtacgagcggttccaccgatacgccagactgttccatcagcactgtgttgcccaacgccagttgccggtgctcaacctttccgcgcacgccgatgccggttcccgattcaaagctctgaggcttcacgagttggaggccctgggcacgcgcggcctgcacgatggcgtcggccagggggtgttcactgccctggtccaggctggccgcaagacgcagcacctcatcgttcgtaaagccgggggctgcgacgacctgatcgaaagcaggtcggccttcggtcagggttcctgtcttgtcgatgacgagggtatcgaccttgcgaagattctcgatcgccgcggcatcgcggaacagcacgccctgcgtggcgccacggcccgttgcgaccatgatcgacatcggcgtggccagacccagcgcgcacgggcaggcgatgatcaggacggccaccgcattgatcagtccatagacccaggtgggctgtggcccgaagaatccccatacaaggagcgtcgttaccgcaatggcgacgacggccatcacgaagtagccggcaacgacatcggccatgcgttgcatcggtgccttggaacgctgcgcctgggcgaccatctggacgatctgcgatagaacggtgtccgagccgatccgctccgaacgcatgaccagcgcgccgctggtgttgagtgtggccccgatgaccttgtcgcccacgcgcttgctgacgggcagcggttcgccggtcagcatggattcgtcaatcgagctgctgccctcgtgcacgatgccatccaccggcaccttctcgccgggtcggatgcgcagcaggtcgccgacgtgcacatggctgagtggcacgtcttcctcgctgccgtccgcattgatgcgccgcgccgtcttgggtgccagccccagcagcgacttgatggctgccgaagtctgggagcgggccttgagttccagcacctggccgagcagtgtcagcgagatgatgacggcggcggcctcgaaatacacgccgacccgtcccatggacatgaaggaagctggaaacacttccggcgcaacggttgccacaacgctgtagatgaatgccgcacccgttcccaggccgatcagtgtccacatgttcgggctgcggttgaccacggacagccagccgcgggagaagaagggccagccggcccacagcacgatcggcaacgacagcaccaactcgacccagctctgtgtagccatgtccatcaggtgcagccgctcgcccagcatcgccagcgccaagaccacgagcgtcagcggcaaggtccaccagaagcgacgcgagaagtcacgcaactccgggttgtcgtcatcgaggtcgggcagcagaggctccagcgtcatcccgcacttggggcaggttcccggatgatcctggcggatctccgggtgcatcgggcaggtgtagatggttccgggcgcggttggcgatgccgccggggccggtgaaactgcggtgctggcatggtgatgcggtgcatggccgctgcctgtgcctatgcccgcgtcaccgctggcatatcgcgccggatcggcgtcgaatttggccttgcatccggtgctgcaaaacaagtacgtgttccccaagtgcgtggaacggtgctccgacgccgccgtgaccgccatgccacacaccggatctcgcgtcgcggcatcgggctgcgtgtggcttgaggacccgcccgcgtcgtcacttccagcatggctggcgtgatggtggtgcgtatgcgggccggacgttgtggcacccgccgccatgcctgcgtgctcatgtcctgaagacttgctgggtgaattcatagtgacaagtgccctccgccgttaacctttggtgtctggtgatcgcagcaggccgcaggcgcgcaaggagacaagcgcggcgtcgcgtgctcgcacggtgcgagtgcctcgactcattgcttctgctccttggaggctgcggcaccttccttaccctgacgcgcggcatgatcgtgtccgccgtggccgtgaccacggtgcatgaacaggtgcatcagcggacaagccgccagcagcaggaaggggagatagccggcaacatgtgccgtatgctccttgagcaggaaatacgcggcgacagcggcgatgatgaggaacgccacgccgtagcgcgatcgccagaaccgggggcgatcgctgggggtctgtgtgtgctgatgctgcatggcatatctccacggagaagggttgatggatggtcagcgatgcgactgatagaccgtgctgctaccgtttttcccaatcagcagcacgtcgtaggcgtccttgcgtccaccataggccggaccatccatgccgggcgaaccgaccggcatgccgggcgccgcgaggccgatggcctgcgaggcttcgcgcagcaagcgttgaatgtccgaggcaggcacatgaccctcgatggcatagccgccgatctgcgccgtgtggcaagaaccgtacttctgcgggatgcccagccgcgtgcgcgctgcggtgttcccggtgtcgagaacctgcacatcgaagcctgcgccttgcaggtgtgagacccagtccttgcagcatccgcagctcgggtccttccagaccttggcaatcggtcggctctgcgccaggctcggtcctgcgagtgccatcaccaacaagccagcgatcaatgcctggcgtctcggcactttgccctggcttctgtcgtagtgcatgttcatggatcgcctctcatcagatgatcaaacccgctaggttctagaaccagaatcgcacgccagccacccagcgcgtctgctgcgcacggccgccttcggcacgcacatagtccgcggtgcgtccgaagctgcccgcccgttccacgccgatatagggggcgaactggcgactgaattcatagcgcaggcgcaagccagcagacgcttcggccaggcccttgccgataccgcgttccgggtcgtccttgccataaaactgcaactcggcgcgaggctccagaatcagtcgctgggtcagcagcagctcgtagctgccttcgacacgcagcgccgtacgtccaccacttcccacgtagcccgtcgcctccagctcgaaccagtagggggcgaggccctggatgccgaaagccaaccattgacggctcgggccttccccgttatccacccgaacgccgagctgggtgtcccagtacggtgcgacggcgtgcccccagagaagctcggtacgcgattcttcgagctttcctttggcgatatcgccttcggccttcacgacggccttgttgtaggtcgtcccataccacgcctggaggtcgtaggccgtggagtcgtctcctttgcgcgtgaagcggcgttccagagtttcgccgcgcaacgaaaagaacctgtgttcgtcggccagcatcagccgcggcacaccgggtacggcgtagtcgcccgatcccaatgtcaggccattggagtagccatgcggatcgcgggcgtcaggaggcgccgacccgccctgcatctgcatgttgccgtgatccatggccggggccgcggtcgagccgctcgccgacgtcgcgtgacccgcgtgcgggtcggcggcaggagccacggtctgagtggatggcgcggccgtttgagcgtcggcctggccgtgcgctgcatggtcgttctgtgcttgtgcctgggcggcgacgcttaccagggccagaagcgtcgtggccagtgcgcgagtggggagtgctttggacattcttggtcttccttgtgcgctgggttcaagacaccacgacttcgcggaacatgccggcatccatgtggaacatcaggtggcagtgccacgcccagcggccgagcgcgtcggctgtcaccaggaagctgatgcgttgtgccggctgcaccggcagggtgtggcggcgcgcaaggaagcgaccgtcggggctttccagctcgctccacatgccgtgcaggtgcatgggatgggtcatcatggtgtcgttgtgcagaatgacccgcagccgctcgccgtgtttgaagtgcaccggcgtggactttccgaactccagcccgtccagggaccatgcgtagcgttccatgttgcccgtgaggtgcagttcgacctcccggccggggcctctcttgtccagcggccccgacggggtatgcagatccgcgagggtcaacacgcgccgaccgttgttgcgcagtccgatgccggggtcatcgaggttggtgcgcgccatgtcaacgcgcatgtccgtgctggcaccatactcggtgcgagcgtggcgagcagtagtgctgggcacggccagtccccccgccgccgcggcgtgttggctgtgatccatcgccatgccaccgtggttcatggcgccgtgattcatgcctgccatcgccccatgatccatcccggacatcgaacccgagcccatcccggtcatcccggtcatgcccgtcatgcccgtcatcccggtcatctccatggcctggccggacccgccatggtccatgccccccatcatgccgcccatcatgtcgttcatggtcagccattcgaccggatcgagggcaggcacgggagcttgaagaccttcacgcacggccagcgtggcacgcgcgtagcctgtccggtccatcgcctgggcgaagatcgtgtaagcgtcatcccgtggctggacgatcacgtcgacggtttcgccaggaccgaatcggaactcatcgacggtcaccggctccacgtcaacaccatcgacgtgcaccaccgtgagtttcagtcctggaatgcgtacgtcgtagaaggtgttgcccgcaccgttgaccatgcgcagccgcacgcgctcacccggtcggaacagcgccgtccaattgccggcgggggtgacgccgttggccagataggtcagcgtggcggcagacagatctgcgagatccgtcggattcatccgcatctcgttccacatcttgcgcttgtcgatcgcagcggccgtgccttcgcgcgaggcgtcccggaagaagtcgaagacggtaggttggttgtagttgtaatagtcgctttgggacttgagcttggtgaacacccgcatcgggtcttcgtcggtccaatccgagaacagcagcacgtggtcacggtcggcgtggatggtctcggcgccagcggggtcgatgatgatcgccccgtacatgcccgtgagttcctggaagccggagtgcgagtggtaccagtaggagccgctctgctgaaccttgaagcggtacgtgaaggtctcgccgggagcgatgccattgaagctgatgcccggcacgccatccatctgatacggcaggatgatcccgtgccagtgaatggatgtggcttcacgcagcttgttggttacacggattgtgacggtgtcaccctcgcgccaacgcaatgtcggtgccggcagcgagccgttgatggtcgtagccacgcctggcttgcccgtgaagttcacgggcgattcggcgatcaccaagtcgaactcggtgcccttcagcacaggggcggcaccgcgcgtcgcggagccttgctgggcaaatgccttgaacgccggcgtggacagcccagcgagaacgccgccggcggctaacccttggacgaaacgccgacgagaaaggccctgtgtgggcacgataaaaaagggtgaacgaggcggcatggcctgaaatcctccatagatgactcggaagtcgttctaaacgccaccccatcctgagcggcacagttcgacgcaatgcaggtcatgctatgggttgggcactttccatcgaatgacccctgaattacattcatgtaatgttcgtgtcatgttcgtggaagctggcaaccagtaaattgctgattgaaagtggatgaatgcgtacatcgtgagcggctatttttccgcgccgtagcgatttcatgggacatgcgatgaaactgctggtcgttgaagacgagaacaagacggcggattacgtccgccaaggtctcatggaggcgggattcgtcgtggatctggcgcgcaacggattggacggacaccacctggccatgggcgagacatacgatctggtggtcttggatgtcatgctgccggatgtcgatggctggcgcatcgtgcgtgcccttcgagatgccggtaaacaggtccctgtgctctttctgacggcgcgtggcggtgtagacgaccgtgtcaagggattggaactgggagcggacgactacctcgtcaagccattcgcgttctctgagttgctggcgcgggtgcggacgctgctgcgacgcggaagcgctccgagccagcctgatcgcatccaggttgccgatttggtgctggacttggcgcgccggcgcgcaacgcgcgctggccaacgcatcaatctcaccagcaaggagttcgcgttgcttgagctcctggcccgtcgccagggggaggtccttccacggtctctgatcgcgtcgcaggtatgggacatgaatttcgacagcgacagcaacgtcatcgatgtagccatccgccgtctacgcgcgaagatagacgatgcgttcaatccgaagctcatccacaccgtgcgtggaatgggatacacgctcgatgcgcccgatgatgcccctgcgccataagccgcggcaaagccgtccagcgtcgcttgcattgagggtcacggccctcgttggtatcgccacgaccttggtgtttcttgtgttcaattgggtcattctccggtcgttggagcaccactttgctcaacaggatgcccacgaactggaggcagtgacaaccgctttggctcagcccttgcaccagcttgcaagtgacatcgcaagcgacgaactgaagcaacacttggccaacgcagtcgcaggacatcatgggatgacgtacggcgtctacgatggggctggcaatagcatctatgccacgcccggtcctgacctgtctaaacttgccagtagcaaaaagttggtcaaccgcatcaccgctgacgatttgatcgtgtggcaggaggatcagaggtcatatcgaggtgtggtgctgcaactgcctgctgacgattcagcggcgcccggctaccgcatcgtcgctgccatggacatcggctttcatctcgacttcctggcggagttcaagcgcatgctctggtgggcaaccggcttggtcatgtgcctggcgctcggtgtggcttggctggcggtgcagtggggccacctgccgattcgcaaggtcaatgaagagattcgggcgattcgctcttcaaagctggatgtgaggctggatcctcgggatgtgccgatcgaactggcggaactggtattcgccttcaacgatatgttggcgagaatcgaggaaggcttcacccggctatcacacttttccgcagacatcgcgcacgagttgcgcacgcccgtcaccaacctggtcacgcagactcacgtggcgcttggccagccgcgcagcaacgaggaatacagagaaatcctctattcaaatttggaagagtttgatcggatgggacgcatgattggtgacatgctgtttcttgcccaaacggaaaatgatccccgcaacttgcgtctgtctaccattgatctgtccgaattggtgcggagtctgttcgactatttcgaggcgctggcagaagatagcggcattacgcttggtgttaaaggggcgatcggcagcatagcggcggatcgggaaatgctcacccgggcgctgaacaatcttctctcgaatgcaattcgacacacgcctcgcggcaagagcatcacggtcttgctttcgcaggacgagcagtggacaacgatcagtgtggtcaatcccggtgagagaattcctgagcgcgatctaccaaagctcttcaaccgcttctaccgagttgatccggcacggcaacgaaatacggcgggcgccggtcttggccttgccatcgtgaaatcgattgcggaggcacatggtggctccgttgccgtgacctccagtgagcttgtcaccaggtttgacttggtattgccccatctgcggcagtagtccgagggcgctgcggtccgtccagccaactggcgtatctctttgcctgattctgggatctacccggccggccacgttgctacgcgagcgggacattttttctccgtgactgccacgtgcccagtcctagcggcaggcgccgacatcatgcgcttgtgtatcccatcgctacgtccacaccgcgcgcgggggcctttgctcggtcgtgatccggtcaccgatcgtcgatagcctcagcggtcagtgccgaacgtctgcctgctcggcgcctcgatcgcgcgcagacctggctgtgtgcgctgagcccctgaggtgagttggaagttggtctgctggttcgttgcgcgggtatatgtacccgtagctgggtacagagagtcttattgatcaagatcaaggtactgctatcaggcgccggctgcatatgaacgcagccaaccgccaaaactacctatgcaggtgtccactaaaacttgaccactgcaccccgcccgaaggcttctccgactcgcccgctgacgcgggccaggtcaaccccacaacgacaggcgagaacgccccgccatgccttgcagcgccggtcttgaggcgtggcgtggaagctccatagcgatgccgggcgggttgtccctgaaccgcgttgaggacggcacgcacctgcacaacctgccgcagcaagcgccagcgtgttcgccagcgtcccgtccatcgcggcggggcgctggccgggccgatccggcgcagccggttcggcggcatcgaggggcgccaagcatcgcgcggcggggatagcccgcagggctttcccctggaggcaagcgaagcgcgcagcgccgcaggcgcgaaggcgtgagcaactgtcttgaaagtcaagcctcgcaagcgcgcaggctccattcaattgaagcgttttgccaatgattcaataaatgttgtattatcgaatcatgaacgagacccaagccatttccgccctcggcgccctggcccatacccagcggctgcgcgtgttccgcgccctggtggtcgccggccccgaagggctgacacccagcgtcctcgccgaccagctcgacgtggcccgcaactccctgtccttccacctgaaagaactggcccatgccggcctggtcaccatcgagcagcagggccgcaacctgatctaccgcgccgacttcacccagatgaatgggctgctcggctatctgaccgagcactgctgccagggcggcgcgtgcgaggtcaccgaatcctcctctgcctgtacttcctgctgaaaggatcacccccatgaagcgctttcacgtccacctgcacgtcgatgacctgaaccgcagcatcggcttctattcccaactgttcgccgcgcagcccgcgcgcgtcgaaggcgactacgccaaatggatgctcgaagacccgccggtcaacttcgccatctccacacgtggcaacaagccgggcatcgaccacctgggtatccagaccgacgatgccgaggaattggcggtgctgaaggcccgcgccgaggcggccgacatgacgctgctggacgagggcaccacgacctgctgctacgcgcgcagcgagaagcactggatcaccgatccgcagggcgtggcctgggagcacttccacacgctgggcaacattccggtctttaacgaagcggcgcctgcagcgacttccgccgcagcgtgctgtaccccggtgcgcggcaagccggtgggcgttgcggtgaagccggcttcctcctgctgctgatgtgagatacccatgaccaccgacaagacctacaacgccctgttcatctgcacgggtaactcggcccgctccatcctggccgaaggcatcctcaatgaattgggccaggggcgctttcgcgcctactcggcgggcagccaccccaagggcgaagtccacccactggcgctcgccacgctggagcggctgcacatgccgaccgccggctaccgcagcaagaactgggacgagttcgcggcgcccggtgcgccggagctggatttcatcttcacggtctgcgacaacgccgccggcgaggtctgccccgtgtggccggggcgcccgatgtcggcgcattggggtgtgcctgatcctgcagccgttgaaggcaccgacgagcagaagcgcaaggcgttcacggatgcggcgctgacgctgcgccgacgcatcgaattgttcctgtcgctgccgattcagcgcctggatgccatgtcgctgcagcacgagctgcgcagcattggtacgaagtgaggttggcgcgatgagtgttggaacccaaacggccggccgcgtgccggccgcccccaccatgagcgtcttcgagcgctacctgagcgtgtgggtgctgctgtgcatcgtcgccggtatcgcgctcggccagttcgcgccgggcgtgttccaggccatcggccgcacggaagtggctcaggtcaacctgcccgtgggcctgctgatctgggtgatgatcattcccatgctgctcaaggtggacttcggcgctctcggccaggtcaagcagcactggcgcggcatcggcgtgacgctgttcatcaactgggccgtcaaaccattctcgatggcgttgctggcgtggatcttcatccgccaggtcttcgcgcagtggctccccgccgaccagctcgacagctatgtcgcgggcctgatcttgctggccgccgcaccttgcacagccatggtgttcgtctggagccggctgaccgggggcgatcctgtgttcacgctgtcgcaggtcgcgctgaacgacaccatcatggtgttcgccttcgcgcccatcgtcggcctgctgctgggcctatcgtccatcacggtgccgtgggccacgctgctggtatcggtcggcctgtacatcgtgattcccgtcatcctggcccagttctggcgccgcgccctgctgagcaagggccaagccgccttcgaccgggcgctggagcgcatcgggccgctgtccatcgcggcgctgctgctcacgctggtgctgctgttcgccttccagggcgaggccatcatccgccagccactggtcatcgccatgctggccgttccgatcctgatccaggtgttcttcaactccggcctggcctactggctcaaccgcaaggcgggcgagcagcacagcatcgcttgtccttcggcgctgatcggcgccagcaacttcttcgagcttgccgtagccgccgccatcagcctgttcggcttccagtccggcgccgcgctggccaccgtggtcggcgtgctgatcgaggtgccagtcatgctactggtcgttcggatcgtcaaccaaagcaagggctggtatgagtgcggcccgaaccctgcccgcggataaccaagacacgactcatgagcaacatcaccatttaccacaaccccacctgcggcacgtcgcgcaacgtgctggctctgatccgcaacagcggcgaagagccgaacgttatcgaatacctgaagacaccgcctgaccgcgaaacgctgcaacgcctgatcacggacatgggcgcgccaatgcgcgccgtgctgcgtgagaagggtacgccctatgcggaattgggcctcgatgacccgaagtggggtgacgagcagttgattggcttcatgctccagcaccccatcctcatcaaccggcccatcgtggtgaccccgctgggcacgcgcctgtgccggccctcagaggccgtgctggacatcctgccgcagccgcagcgcggcgcgttccgcaaggaagacggcgaagccgtggtggatgcggagggtcgcagggtctgagacctcccgcacaagcggcaggcaatctgaagtgaggctggtattatcgaatttcgttatcgatattcgatatgaaagagaaacctactccacgtgccatggagcaccacgacctgctgtcggggctgatccgcctgcatgtgctgcaccacgcagccgagcaggagatctacgggcaatggatgatcgacgagctggcccaccacggctaccgcctctcccccggaacgctgtacccgatgctgcacaagatggagcgcgacggctacctcgtctcccgccaggagcgtgaagggcgcaccgtgcgcaagctctacacgatcacgcccaagggcaaggaaggcttggcgctggccaaggaccgcatccgggagttcaccggggaggcgatgcacaaatgacagattccaccaacaccttgcagcatgaggccgctgccgcgcgcggctcacccgtcgaagtcttcggcgccttcctcaagctggggctgacctccttcggcgggccgatcgcgcatctgggctatttccgctcggagttcgtcgagcgtcgccgctggctggatgaccgcagctactccgatctggtcgccctgtgccagttcctgccggggccggccagcagccaggtcggtatggcgctggggttgggccgcgcgggctggctggggctgctggcggcctgggccggattcaccttgccatcggcgattgcgctgatcctgttcgcctttggcatcgccgagtaccaggggctggcccagtccggctgggtgcacgggctcaaggtcgtcgccgtggccatcgtggcgcaagcggtctgggggatggccaagtcgttgtgcccggaccggccgcgcgccgcgctggccattctggcggcgctgctgaccatggtcctgccctcggccgcgggacagcttgccgccatcgcggtggcagggctgctgggctggtggacattgaagatcgcgcaacccggcggcggccacgcccacagctaccccgtctcgcgcaagctgggcatcgtggcgctgctgctgtttgccgcaccgctcgtcgggctgcccctgtgggcggcagccacggactcgtccacgatagccctgctggaaggggtgtaccgctccggtgcactggtcttcggcggtggacacgttgtgctgccgctgctgcaggcctcggtggtgcccagcggcgtcgtgagcaatgccgacttcctggccggctacggtgcggcgcaggccgtgccggggccgctgttcactttctcggcctacctcggcgcggtcgcccacggaccgctgcatggctggatcggcgggctggcactcctgggcacgatcttcctccccgcttttttcatgctggtcggtgcactgccgttctgggaagggctgcgccaccgcgcgggcatccagacggccatggccggcatcaacgccggcgtggtcggtattctggtgtccgccctctatgacccggtatggacgagtgccatccacagcaaggcggattttgggctggcgctgctctcgttcggactgctgacggtggggcgcgtgccgccggcgctcgtggtgctgttagccgggctggtgggctgggtcatggcgatgggcgtctgaatctcatgtggcacaccctgaccatccagctccgacacgaaaccgccgacgacattgccgccatcgaagcggtcacgaccgccgccttcgctgatgcaccacacaccagccacaccgagcaattcatcgtgcgcgccttgcgtgccgccaacgaactgacgctttccatcgtggccgaagaacatgggcgcgtcgtcggtcacgtcgcgctgtcgccagtaacgatcacccatgagcacaggcgaaagaccgagggctggtatgggttggggccgatctccgtcctgccgccaaggcaggggcgaggcatcggttcgcgcctgatggaacaggcgctgtctgaactgcgggctatgcaggccgcaggctgcgtgctgctgggagatccaacgtactacacgcgctttggcttccaggcccatgcgggcttgcaactgccgggcgtgccgcccggctatttcatggcgctggccctgcatgggacagtgccggaaggcatcgcgcactacagcgatgccttcaacgccgccgcctgagccagcgcgaaggcggcggcgttttaattcggctattggccttgaacaccgggcgcggccactgtcgcacccggatttcgcgtccaccgcgcccagggcggaacggcctgggcgcggtgctgatcgcggttattccttcgtctcgatgcgccaccacacaaagcgaagcgccccggtcgaggccggggcgcttgccttcggcgcgggtcaagcggccagtgcctcggcgggttcatccgccattgcctcggtatcctccggggcgtcctgctccgggccttcttcctgcgcggcctcctgcgggccttcggccttgaagatggcgggcatccagccggtgccatcggccagccgctcggcctcgctggcaatgtcggccttcttgagcttcgccagccgggtgacgaattccggtgcaaacgcgcccacggcatccagaatcacggccttggaaacgtgcttgaagtagccttctgcggtcggcttccaccatgcggccatgtcgaggcccacggcctgcgccagttctgcgccgggctggtgcggcgtggcacggggcgtcaccacgtccaccgtggaagccacgcacacggccagcagccgcaccagttcgtcttgcgacttcgccagcagcgcggcgaacagttcggcgctgtcctccggcaaggcttccccggctacctgttgcagttcgcgcagcgccacagcggcgggcgactccggccagtccggggccatgccttccagccggtcttgcactttcaggctcacgcccagcggcaggtcgtggccgtggtagctgtcctgcaaaaccttctgcaccatgccatgcaccagcgcggccagcgcgacgtgcggatgccgggccacttcgatttgcagcgccgccgtgcggtgggcgctcaaccgctgcgccagctggtcggacaggctcgcggccttgggcgggtcgtcggcgtcctcgtgctcctcgttggcggcttcgccttcggtgctgccgaagccgcgccgcagcttttccagcgtgcgcagcgccttggcctcggcttcgcgcagcaggccgcgatgaataacagcctcgccgttgcggtcgatggtgacgatggcaccggccacctcgcgcacttcgggggcgtagccttgcaaggcattctccgcgtcttgcagttctccgaccacctgatcgcgccgctgttccagcttctcggccttggcctcgtcctcggcgtcgcaggcttcttccagttcggcgtcgatcttttcgaggcgggtttccagcgaggcgatgcggcgggcctcgcgggtggtcggctcgcggcggtggcgcggggcgttctggaacgcctgccgttcctcgtaggccagatgcggcacggcctccacccatgcccagccctcggcgcgcacgtcctcggccagcgttgccagcttgtcgcgcacgagcgtttccagcactgcggtatcggtgaggtaggttccggcatcgccttccgcgaacaggtcgcggcggatgccgccgcctgcctgccggtaggcgtccagcccgacgaagcgcaccagcgcgtgcgcggcgtcgatttcgcgctcggtcaggcgctcgcgcagcttggacgggctgcgctgccattccggcgcaccatagaacgtggcttcctgcgcggcgtggtcgtcggcgaagggacacagcaagaccgccccctcacgccacccacgcacgccggttttcggcaagcggagcgcgcaggcacggatcagcgagccgggccggaggcgccagcgatggaagcccgacaggggcgagactcgcgcagcgaggctcaatgcgcagcacgacagcgcgacggcggcacgccgggacgcccgactgcttgggacaggactactcgttgtcggtcttgcgcggctcgatgtgcaactgtccttgacgtgcagccgggcgtagttgcgaaggtacagcgtgtcgtactgcttatcgggcgatgtcaggtgcaccaccatcaggaaggcgggggactgcttttggacggtgatgccctggcgcaccacatcgcgggcagccgggcctgagcctgggcgacgcggttttgtacccgcaccgtcgcgtcatcggcgttgatgccagaacggaaggtgaccgtggtcaccagcacgccgtcggagccggcgacagacttgatgtacatcatgccttcgacgccgttgatctgctcctccaggggtgtcgccacggtctcggcaatcaccttggggttggcgcccggatacacggcgcgcaccacgaccttgggatattcgctgatcggcagcgccgggatcgcgagcaggcccgagacgaagatgacgatcgacagcacagccgcgaagatcggcctgtccatgaagaacttggagaggtccatgggctaataccttgaaaggagtccagggggaagcgcgccgcgccgctcgttgtgtgatacgtccgatcggtggcgcgctccggcgtggtgcttcatttggtggcggacgcgggcgccgcagcagccaccatgggcaccgccgtggcctgcacaggcatgcccggcaagaacaccttctgcgcgccgttgacgatcacgcggtcgcccgccgccagcccccctcgcacgatgcgcagccaatgggaactgccacccagtttcacatcacgtcgctgcgccagtccatccttgtctacgatgtagacgtagttacggtcgtggtcggtcagcaccgccttgtcgtcgatcaacacggccgagaattcgccgctgccgaccagtcgcacgcgggtatagaggcccggcgtgaaaacgcgatccttgttgtccagcaccgcgcgcacggcgatcgtgccgctgccccggtccacctggttgtcgaggaagtccaccgtgccggtgtgagagaagtccgccttgtccgccagggcgatctggaccggcagctggccgcctcgctcgctggggcgctctcccttgcgcgccatgcgcgagtagcgcaggaacgccttctcatcggcctcaaagtaggtatagaccctgtcctggaacacgatggtggttagcacactggctgcatcgctggcggccaccaggttgcctgcggtaaagcgggcacggctggcgcgcccgttgatgggcgagcgcacttgggtcctctccaggttcaactgcgccgtctccaccgcagcctgcgcggcctgcacctcagcctgcgcggactcgtcagcggcgcggcgctgctcccaggcctcggtggagacagcctgctgctcgaccagcaccttggcacgttgcgcctcgcttctgctgcggccggcttcgctgcgcgcccgggtcaattgcgcctgggcccgggccagttccgcgcggtagcttcgggcatcgatcatgaagagcacatcgcccttcttgacctcgtctccttcgcgataggcgacccgctcgacgtagccagacacccgtgggcgcagctcgacgctctcgatggcttcgatgcgtccgttgtattcgtcccattacgtgatgggcttgatctcgacctgcgcgacgctgacttgcggcggcggtggatggcctccggcgccagctccggcgttctctttacaacctgcgagcgccatcgcgctgagggagatcagtatccaaagcaggcgcacgccgcgagggtcggagctggaagtcgtcatctgaacaggttccgtggtcaggtcgtaaagcgaatgaagcgagcgcgatcgcgctgcacgctgtcccctgacgctgctttcttggcagcgcaagaccatgagcgacagatgcggcagagatcgaatcccgttggttgtcggcttctcgtctcgtcgcagaacgcgcgcgcaaaccgacctcggcggcattacaaagcctcaaaacttgaggtcaagcgatatcgacgttctgattcgcgccgttgcggattggtccgccgcgtcgcatttttggacggctcttgagccgccggttacgcgagaagtgacaagtaaggattgttcggtggtggctctgcgaacaggagccgaacatcgtgcaatagatagccatacaggcggcgggacttcctggggcctgtgacatcgcacgtccagatgttcaggcccctgggctttttgcgatgcagttgcaggcgctcgaagcgcttttgtacccattgccaatcctgctggttctcctgcttggcgagagtcccgacctgggggtgttcttgtgcgtagcgttggaataccccggggctgaccaggtaggccgtgtcgcccaccgtatgcacgagcgccttcgcgtcgttgatgaccagccggcgggtagcgataccttgtttcagccacgccatgaagtgctcgcccgatggctgcgccgacgaggacgtgggcaccggcgctgatgacggcacgggcaccatcgaggttggcggtggcgtttgagggccagcggcgggtgcgtcgcccgagacggcttccgcatcctgttggggaacaagcaaatcgccgattcctaccatcgccagcaggtcctccatgacatcgggtgcggcttgtgcggcaggcaagtgaaccggagtcgcggcgtcgacgccctcccatggaagggactcttgatcgtcggtggctggctttgccgtcattgccggcgagggcaccaaggcatcggcattgttgggtgccggtgtcccgtcgattgccactgcccctgcgaagggcgctggccgctctccagactcccaaatcagcgcgggagcgagacgcagcagggtgaatgagtgggaccagccagtcgtgctggtcacggtcgcgcgccagaccgccttgccgtccggcgtcggttgcaacatgccgtgatcctgcagcacgttgaagacggcggtgttgctcgcggggatgccgtcgacgcctagtgacagcaggtgcgcacgcagcttgtccgagaccgtcttgcttaccagccacaaggcatcctcggtgatccagccatcggaggcttccggctggttcagcttcaactgttccttgagcaggtagcgcagcccgtcgagcaacttgcgctgcagcgcatgcttgtgtgcagccatggcgcgggccggatcgccgcccagttcctgggccaccgaagcccggtcggcctgcacgacaagttcgcccagcacgccggcgcgctcgtactggccggccaggacgtagagcagcggtccccacaggtcgggatagccactgagccagtccagggcatcacggtcgagcagttgacggtagagtaaacctgtcgcggcgctgtggagccgatattcccgatcgtcgcggtagcggaagcggtatggctggtgcagcgggccgtgccaggggtgccacagcgagccgtcggacagttcgacgtgcagatcgacggcgatcttgccgatgtcgtgcagcagcgcggcataagcgactgcggcagtccaggcttcagactgcgccgcctggtcttcgggactgccgccaatgggcagcagatgggactgccgcagcttgagcgcataggcgacgatctccaacccgtgatccagcatgccgccggggtaagcgtggtgatggctttccgatgcggggaattgttggaccaactcggcgtagtgctccagcggcgtgcggtatagggtggcgaactgccgccgcgacagcgacgtgcgctgccagatgtgttccagcagcttctgccggcgcggtgttgccagcagcgatgcggccgattcgggccgcagcaaccctttcgggaggtcggtggcgggcgctggcgacggggcagcgaccgggggccgttttcgctggaacagggagagcatgcgggtgtcctctggggggccggccgggaggccttttcgccttttcgaggtagggcctttccccttgcaccccattcccttgccgtttcggccctttggcctttaaccgtttcggtatagccgggcctgggttgcgtctccagcgtcaatgtggaacccgcacgaatggattggacggagacctggcgctggcccctgcctatgctgcggggacgctacccccggcaggtaggctctcgctcaggcgactaagttgacaaatgcgacaagggcgactaaagtgaatcctgtctcaaacctgcttgggagatgaccatgcccaccgccattgaattcattgccgatcgtctgccgcgcgtcaccgtggaggacgtgcgccgtttcgcggataccgttgaaatccgggatgcgccggctttcgcggccgagttgcaggcgttcattcacgagcgcgtggaggcggtaaaactgccagccaacctcgaaggcgaaacggtggagcaggccctggcgcgcaaggcggccgcgctgcgcaccgaaacgcgctggaccccgactgaaaccgacgtccagcgaggccgcgccgtgttgctggaatccttcaaccagccgcacaacctgccgatccccgagtacgccaagctggcggacaagtcgcgccagcagatctacaaggacatcctcgcgcgccggctgctggcgctgaatgtggggccgcgcggccagaagctgcccgactggcagctcgacccggtgaagcagcagttgacccaaaccgtgcttcaagaggtcgagggcatcgaccactggacgatctaccgcgcactatccgaaccgctcgaaggcttgggcggacgctcgccggtggatgcggtgacgcatggcacaatcgatgacgtggccgaagcggtgttcaacgtgctgggcgtccaggtgcattgaggcaagaccgccatgagccgcgaactgcccttgttcttgatcgatgcgggtgaactgctccagcatgtgagccgcgtcgtctatcggggcagcccgctgtactatggccgcagcggcaccaatcgctacgacgacccggcgcggacctacggcgtgctctacctgggccgcgacctgtccacggcgctgatggagtcggtgtttcacaagcaccagtggctggcggacgagaagcgctcgattgcgctgaaggaagtcgagagccggctcgtgcgggccgtgggggtcctggacgacgtgcgcttggccgatctcacggccgagggtgtcatggcgggttacttcggcctgaacctggaacagttggccagccgcgactacacgcacacgcagcaggtgtccgcccaggtgcatgcgatgctcggcgatgatggccagccgctgttcgacggggtgctctatccgtcgcgcaacaactatcccgccaagagcatcgccctgttcgagcgtgcggcagcaagagtcggcgttgtcgatgacatcgacctggtggaccatgtggactggccgcgcttcgttgccacgtatcgcgtcggcgtggagcctgatcccgggccggtggaaccggatgacgaagcgtcctgaagcggcaagagagcacattgaagccccaaacagaatgaaatggaccaaactggaataggcatccctctgtagcaggagacgaccatgaacaccacgacccgcatcagcaccgcagaacgcctcggccgcacctttggccgcggatggcgcgcctacgcgcgcggcgaacgtcgggcgtcgaactggttggtgtccaagggggtgccggcggccgttgccaccgcgctcgtgtgggtggtcaagctgtctgtggtgggattgctgctctacgttgctttttggttcgcactcgtgttgttgggcgtcgtggcggcggcgtgggctgctgctgccaatacctctgacgaggacgagtggcctttcaccgatctcacagaactgcgcaagacaccgggctacgatcccaatctgtacaacgatacgtcgcacgagttgtacaccgacgactgacggactccgggctacttcagcttgcctcccgtgagtgccccagcccccttgcccccggcttggccggcgctcttgctcccgtccgacaacccctgaatggcatgtcccgcccgaattccaacccaggtcaggcttgccagccagaatcctggcagcaccaggaacatcgtgcccgcgacgaacatcaagagcatgtcgccgaacgcattgttcagccccaccagcgggtcgaagttcgtgtgtggccggttccagccaaagccccagccatagagcgcatcgaggatagtgctgtcgatccagcgagcgagctggaaccagaaatccacgaagaacagcgcgaattgcacgacgctgaccgtgacgaccgtcttcaggtcataggtgcccacgaccagcacgagcgggatgcagatgaccagcgccatcttgagcaaggcgaggaccatgggtagagactgtctcacgacgtccatggcgggaaacgcggcaatcgcgccgacggccatcccaacgtctcccgtggcccgtgtcacgatgttcggcaaggtcttgtcgatctggcctccgtagtccgtatagacgctgccctggttcaacttctgctgccgcggtgacgcgatggctcggatcaccgagtcgtccacctcggcccggctcaggaacccggcccagcccgccaggcgactcaacaggctcgggtccacctgacccagcaggcgtgcccgcaggccgttacttccatcgctccaccactggcggcaggtcgggtagccgccaccgctggccacctgcgcaagccctgcgtcgcgggtgctgtcatagggccagtcctcgcgtggggtgctggaacggtatgtgtcgtagtagccgttcgtgtcggtgaagaaccgcgatccgatccaggtcacgtcgtgcatctgctgctcatcgagctgagggcgctgcatgaacaatttggcccgtgcaggcccatagcaatcccgcgagaaatccgctacttcctgagccagcaccgggtcatcgatgcgcgtagcgtcgatctccatgcgcatctgccgcaggtccgtgccgcacgggatcgctgccaccgaagcgcccgtgacggcgcgcgagagcgcgtgcatgaacgcccaccacaccggcaccttcgccgactggttgttgatggtgctgaaggactgcgaccagccggtatccccgggctgcgccacgctgacctggcactgggccgagcgcgagctgtcgtactggatggtgttcaggtccacgtcgatgaacggaatgccggcgaacatcaccaccacgatggcgacgaagacccggttctcgatgcgggcggcgctcagcacgcctttgttgccctcgtcggcgccttccgcacgggccttcaaccactcctgcacgatgatggcgacgaaaggcagcgcgaataccccgctggatacgaggaccgcccagatgccgttgttgacgatccaggacacgagggttaggtagtactccaggtagtcggtcgtgaaaagcgtcatggcctcgatcccctcaagcggcctgcatcaacaggctggcttccagcgccacgatggcaacaatgccggcgacctcagcgcgaatcagccggcgtcgggccagcgtgctgtcctcgcgcgccagcagccgccgccgcatccagacccagccgcaggccgtcgccccgtacaggaacaaccgccacacgaagaagtagcccgatgcggccgcgagccaccgctcccagccggccacgctgccaacgagatagatgccggcgatgttggcgcccaccgcagcggcgacgatcacggccgcccacagcagtgctttcgccgcacgccggctgatgagccagcgcaaggggcgccaggccatgcgctccgcgctcatggccggcctcccggattgcccttctgcaactggtcgaggcggtcgggcaccggatcgccctcatagatgccgcgcgagcctgccgcgcgcgtgccatggcgctggatgatggccatcggcgagttgttcgccagctcgcgccgcagttcaagttcggtcttgaggttgcggatctcccggtcgagcgtgtcgctctcgtggttcacggcctcgactgccaactcgttggctgccacgttgggctctttcttgccggtgagcagcgtgcgctggagcagcagtgccttctccagcaccgacgaaagcgccacctcggacgcgaggcgccgcgccagcaggtcctggtccggctcgtcgcgcagcgcctcgatgacgccgcgcgtgatcggcagcgacgtgctgccggcctcgcgcaagttctcgaaggtggtgttgcgcacgccggaaaccagttcctgcaagacttccagcttggcttcgtactcctcctggatcagcggcgtcagcccgacgccgggcaccgtctcggtcttggtgcaggaatcgcacgtgcgctgcacctgttccccgaggacccgggtggcccattcggtcgcctgctgcggcgacgtccaggtctggcaggacaggctcgcgcaactggtggacgcgatggaggatgtgtccgtcacgccgcgcccgttgaccaggttgtagcccgcgcgggtgacgtcgccgaccacgcggatggcggactggcctgcgccaccggcattgctgccgcccacccagggaaggccgtcgttgccgcggcgcgtctcggcctgctcgacggccgacacggcatcgttgctgccaaccgcgtcacgcaaggccatgccttcggccatctggctccagccaagctggccacccgcagtctcggccatcttctccgccatggcgcggcacgtcagcttggagcggtcgaagtccagccgcgcctgcagcacgccgttggtcagcaggttgtacaggcccggatcggcgcgctgaatgatcagcgccggcagcgatgcaaccgcgctggtcgcgctctggatcacgttgctcatgatctgctgaaagccgttcgtgatgccgttgagctgattgcgcagcgtggtctggatgctcatgtcgccgcagatcaggttgctgttccaccccacgccgaccccgatggagcgcatgccggccgcgcggcccatggacaccgcactgccaccgccgatcgagtacatgacgtcatcgccgaggacggggccgctgttctggtatccgacctgcgcccacgccaggccgcagaccagagcgagcgggccggccagcgccttcgggcgcagcaggcggcacgccttggcggaaaggttcatcgattcaggacgcttcatcgtggcacctcagaggaaatcgacgctgcccaggaacacctgcccgcggcgttcgcagcacgcatagggacgccacagcgcccaggcgtagtcgccttgttgggcctgggtcagcgtgccgctgtgcgggaacaccacgcaggtgttggacaggcgcggcgtcagctcctgccacttgcccgtagaggcatcaccctccatcagcgcgccggccggccagtagccgtcgcgggcgttggcaagcagcggctggtacacgtggatctgcccgcggcgcgtgacgacatcaccggcgcgctgggccacgacggccccggatttgtagtcatcggtctgatgcaggaagccgccgcgcggatagacattgccccagaggttcatcgtggtgcgcgcaccgacctcgcgcatgcccggaatcaacgcctccgggtaggccatttcaggcacgttgtagcgccaagccagcgtgtccagggtgctgagtagatacggcatgaaggccgtgcccgcgccttggcagaaatagcccgacgacgatgcgaactggttgaatacctcgccgccaggatggccgatgacatcgctgttcttgaatttggcgaggttgttttcgtggtcttcgttcgtggtcccatccccacctgcctgtgcggatgggttgggcgtgctcatcgcctgcacctcgacccaggggttctctccggtgttgctgtagctggagacgaccgcatcgggcacgtagtgccggaccttggtggatgtgcgcaccgtgcagcccgtccaggtgcagtagagccagtagcagatgcccaccacccggtactccaggcagtccggcgacatgacggaggacacgatggtggcggtgttcaaggcgtagctgcccgtggcgctgatcagcagcagcgaggccacggcgacgcgcaggcggcgcagcaggtcgaatgggcgatgggtcacggctgcgtcctccggtgttgctcgatgcgcgcgacggcccgggccacgtccggctcgccatagaccacaaagcgttgatccaccacgacggccgggatggtcgtgacacccaaactccatgcgtcggtgacgccctggtaggcggtgccgatgcggcgctgaagatcggtgccgccttgcttcaggcgttgccggacgatggctgctgcccgctcagggtcggctggaagattcgcggaaagctcggcctcgatccggggcgtttcgcccaactcgatcagtcgctcgccgcccatggtcttgaccgggtggcggctgtcggtgacgaccaccacgtcggcggcgaaggtggccgggctgaacaccgccagagacgtcggcagcgccacggccaggccaagggttcgccagcctggtgcgaaccgggtaaaagctgctggcatgtcatgtgccccggaagttgatcagggccatagtcaaacgccgaaccccaggcggccccaacaaacaatgcgcatcgcggccaccccgcatacctgcttgcgtcgccgcaaagaaaaaagcggaggccgaagcctccgcgctgatcaacgaagcagtgcaacccttacagcaggccggactccgcaaaggagaacggggcaccctggccgacgatgatgtggtccagtacccgcacatcgatgagcgccagcgcggcctgcagttgctgggtcagcatgcgatccgcgctcgacggctcggaaatgcccgaggggtgctggtgcgcgaagaccaccgcggcggccttcaactccagcacacgctgcacgacgacacgcggatagaccgaagtcgagttgatcgtgcccctgaacaacggctcgtaggccagcacctggtgcatgctgtccaggaacaccgcggcgaatatctcattgggctcggcgaccagcttcacgcgcaggtagtcgcgcacggccgtggggtcgaggagtttcgcacccgctttgaaaacccgcttctccagcagtgcaatggcttgctggatgatccagtcctcgtgttgggcagcgatggcggaaagcgactccaggcaggagtcattgacgacgaaagacatggcgaacctccagacggtgagatcggagggcgcgcgccctgggagggcaagccctcctggggaacgaacaaggtgcatccatcaccgcggcagcggtgatcgttcgcggccaggatgcgaggcgaacgggtttcggtcagcgcagtggactgcgccgtagccttgaagaccggggctacctgggcatgtcgccgacgacgtcggcaggcatttccgatgtagtaggtgtggcggcgggatcgccggccgcgagcatgtccatggccgacagcaaggcatcgccctcgatcggaccctgcagtaggatcgccttgccggtttcgcgatcgtgcagccgcagcgacggcgtggcggtcacgccgctgctcgtggcttccgccgtctgggtgcggatcggcgcctcgggccgttcgctcgccagacactgctcgatggctggcgtaaggtcggggtaccgcaggtcctcgggcaagccctggccgtcgctgcgcgtgtgggcatagacccactcgacagcctgccagaaggcggcatggccgccagattcgccggcgcactccgccaggctcgcttcggcagacgcggccggctcatgcgcggccaacgggaggtggtgccattgcaaggccacgtccgcgttgccggccacccaacgcttgagcactgggaaataggatcggcagaacgggcattcgaggtccgcgtagagcgtcagcgtgaaacgcccttccggatttcccatctgccacggaggcccggccacctgcgtcacgctgaccggcgttgaagtctggggagtggacttgccagaatagcgggacacgagccagatcagcagcagcgctaccagcacggcggccaacacccagggccagctgagcctccagcgccgacggcggaacgcctgtacctgcatcggaatggatgggcgtttctgttccatggcgttctccggtgtacggcagattcagggcaggtccagggtcggcgactcgatgccacgtgcccggtcgatcttctcagccaccttgaaggcggcatccagctcgctgacgccgtgctgctgcatgagctggtagcgttctgccttctcctcgggctcggtttgcgcgagcgcgaggtagagacttggcggcacggcgcggaacagcacttccatgctcttggagaggatgacgccctcggtgaacttgcccgcttccttgcgtgcggagagcatcagcgccttctgcgccggcgagagttcgcggaacctggcgatcttctccacttcgtccggcggcatcgacaggcacacccaccactcgatcatgttgagcatgggctctgcggcgcgcggcagatcgtcgatgttttgcgtcgccagccagaaccaggcgcccaacttgcgccacatttttgtaattttcacgacatagggcgcgagcagcgggttcttggtgatgatgtgaccttcgtcggtcacgttgacgatcggccggcccaggtactggtcgcgctcggcgatgttgttcaccgtgctgatcaggctgatgtaggcgatggagagctgcgcgttgtagccctcgcgggcataggtcgccagatcgaccagcgtgatgtcggcctcgggccacggcgtgccgtcacggtcgaacatctcgccgtccgtgccttggcagaacatgtccatcgcgtccgccatctccagcagccgcacgcgccgcatctcgggcagcgtcgggtcctggccacgggcgcgcagcgcgttgcgcacgtcgcgcgtgagcacggtgcgcttttcggccacgcaatgttcggcggcgtcgaggatgcactggcggatcagcgagcggtcggcccgcgtcatccgcgcttcttccttgtcttcgccgcccgtgatcatcagccgcgctgtgatctccagttcgcccagcacgtcgcgctgctcgtccgcttccatggccgaggcatcggggggcaggtcttcgtccagcgcgtcggcatcgagcgtctgtacgtcgctgggcgtttcgatcagccggcgtgcgtcggcgaacggcgccaggctgatgcccgatccgggggccagcttgacccggttcacggtcaggcccaggcgcctggcgaagtcgctgaacaggccgaagctgttgccggcttccacgatgaaaagccgcggccggtagatggccgtcacctggttcagcaggttgttgagcgtggcggacttccccgagccggtggggccaaatagaaacagatgggcattcatctgccgatccaacctgttcaaggggtcgaacgtaatcgggccgccgccgcgattgaacatcgtgatgccgggatgccccgtgccctgggcgcggccccatactggcgacaggttcgccgcgtgctgggcgaacatcagttgcgtgtaccaccggcgccggtccttgccggggttgtagcagcacggcagccagcgcaggtagctgttgagcggcgccacctcgtcgtcctcgcgcaccggctgcaggccggcgttgagcatcacgttcgcgaggtccaggccgcgccgatccagttccgcctcgtcgcgcccgcgtaggtagaacgccagagtgccccggtagagcttgtgcgcgctgccgatcagggagcgggcttcatgcacgtccttgagcgtctgctccgacgccagcgtctcgcccacagctttcttcgccagatggttgaggtccgattcgaggacgtcctgcggcgtggccaccatggtgagacacatcaaggtgtcctcgggcatctggtcgaacagcgtgttgatcgcgtcccccttgcgggtctcgccggtcaggtgcccggtgccgggcggcatgcgcagccggtcggtgatcagcacgcggtgcggcatgccgtcgaagtaccaggccccttgcgccacgtccgagcgcggctgcccaaagaacagccgctggctgaaatcccgcccgctcgccagctcgatctcgccggcctcgctttcctcggtactgtccggatagcgcgccaacgcgtagaagcgctcccggtcctccaccccaggcccgagcagcgtggggcgcgggttgaaccaccgcagcagccagtcgtggacgtcggccgcgaccatgcgccgggcctggatgccggcgttcgccaggccgccgcacaggcggtcgcagacgatgcccagcatctgctcgggtgtctggccgcggcggtttgcctgtccctgtccgctcgcgcggcggtacaccaccatgcgcacgcgccgcgtctggccgcgccagcgcagccgcgtgaccaccgtgtcctcgaacaggccgccgggcttggccacagcgcgcaggtggtggccgaagaagcgcaggtagaactcggtgaacgccgagccgcgcgcacgtggctgcacgtaatcgcgcaaggtctgcatgtactggtcgaagctcggttcgtcctgggcatagagctggagcacccacgggttctcgtccagttcatcgaagctgtcctgaagcgcgttttccagggcgtcgcgggcatgcgcgagccagccgggttcccggccttcggtgcccagcggcaccagctcgtagaaggcggccaccgattggccgtcctccaggagcatcgatttcgactcgggcaagaactccacccagggcagcagttccacgaaggacggtgcgacgtcgtacagcgcctgctcgtcggccacggtcgccggcttgcggccctggaccgcggcgccgggttcggggatgccggcttgctgcaaggcctcgacgtggcgctgccagccgtccggctgctcgtcggcggcggtgtcttcggcgctgacggcagccagcttcggccatggaagtttccaccgcatcagtagtcctccgtcctctcgccaggcatcgcgtactgcacgcgctggtacaaggggaaaaccgtcgtgtagcccggcacgggaacggggtcggtgccggccaggtgcgggtacacgtacatcacgagatcgggattgggcagacgctggaactggcggtgaacctcattgcgcgcggtgcgcgtgtagcgcatctgctcgacaggtgcggcctgcacgtcggcgtcggtcaggggccgacgcaggctctggcgcgcatcgagcaactggcggccggcgttccgtccggctgcgccaccgccgtcgccggcctcctgctgccagatgtccatcatcgtgcggtcaccgtgggtcaacagcttttccttgctggtggcgcagccggcgagcaccgcgacggcgagggccagtgctaggccacgggccaggttagtcaagttcaagggcatggctttctcctgcgcggtgatcgaccttgcggccttcgggatcgaagtcgatggcgagcggcttttcgaggtggacggcaaccttggcgccgggttggacatagacggcggcgaaggcttggccgtagagcttgttgacccaggccgacatgtcccggacaccgcccgcgagaatctggccgaccgcttcttggccggtgatgcccacggtgccgatggagccgtccgagccgacataggacatgcggccgctgccactctcgatgagcgaggccacaccggcaccggccgcggtgatcagggcctgcgagccgaggtattgctgggcgttgctgcgccgctcgccgctgacgcaaggaatgccgtggggatcgctgatccagcccaagccgtcgcgctgttggttgttctgctggttgccctcgcggtcttcggggatcgtgcgaatcgtgccgtcgttgaagacgaacgtgatgctgcgcacctgacctcgcacgcacgagagcgtccagtcgcccgaggcggtgccgctgaacacggcgccggccacgtcgggaatgtcgatgccattggcggtcaggttgtccggcccgaccagaactttgaacggatagggatcgttgaccgtgccgtcgatcggcacgcggccgatcagggccgtcatcgccaccgatcccattagcgtcgagttggtcggcacggtatagaccggcttggcattcttgaccccggcggcgcgggcgcccgcgttggccacggtttcagcggtggtttcgagcgtgctctgcgccgggccgaagctcgtggggaagctcatgccgccgctcgcgccacgcccccccgttgcgcccctcggcgggctttgcgtcgtccggctcgacccaccgcacgccgccctccatgccggcctcgtcgccgccctgcagccccaggcccacgggcaggtccgcatggccgccgccgcgcccgccgatgctgtccaggcgccgctgcaggtcggcgagcagcccttcggtctgctggcgcgcgctggccgcctgctcttggtcgcggcgcaggttggaccgctcggattcgagcgccgagttgatgcgctggtcgatggagttctcgcgctggcgcagccgctggttctcttcacgctgcgacttgttgtccgagagcgcggtctgaagctcggtgcgcaactgcttcacttgggcaacgagcgtcgccacggtgtcgcgcggggtgtcgccttcgatgcccagcgccttcatttcctcgggcgtgagctgggcgccgttgtccgccacgggtggcgccgtgccgcctccacccgagaacagccggataccggcgaacagcaccaggatggcgacagggatcatcagccacttgagcaggccgttactgcgcatggcgggcctccttggcgttctcgtcgccgtccggctgcggcagatgcacggcagggtcgaagcggtgaatcgccggcagcagcgactgcgcgaggccgcggccgcgcgtgaccaggtacagcacggtcgtgtcctcggtcgtgccgcgcgggcccagcgcctcgtgctggaaggtggcggtgaggaaatcgccttgcagcacgcgcgggtcgagcgcgacccagtcggcgccggtgttggtgaggcgcacggcagtcacccattggtcttccaggcgccacgacgcgagcacggccgcgcgcaccggcagcgttggcatcagtgtgtccaggtcgaggtcgcggggaaggttgacccgcatgacgcccggaagcggctcgacggtgcgcagcggtgcgtagaggttctgcgcggcgaagcgcgtcagcacgacagggaccggagtttcgcgccgcgcggtccgcgcacctgcctggccctgggcgcgtgccggggcctcggcactgtcggcctgctcgccatagcgtcccggtgcgctgtcaccctcgacgatgcgcaccggctccagctcggcttccccgtccttgggcggttcggctgcgatgtccagcaggatcagcgcgcccgtgtcggcgtcctgcagttgcaaccgcgtgggctcgatcggctcgctggcacgcaggtacaccgcgccgcccgcactctgcacgcgcaggcgtttgcccacgcctgcgggcacgcccacgcgcacgttccggtcgatgaatacgatgcgttcctgaccgaccttcagcggcactgccagtggcatgcgttcccaacgcaggatctccaccgcctgggcgacgggtgccgcggccacggccagtagccccagcagcgcgagtacaggatgcttcatggggtgtttcctccttgaggcgcttgcggattcaggtcactcggcgccgggcgcgccggctccggtgcactgatgcgctggggcgcgccttcgtagcagtccagcgccaggccgaacgggttgcgggcgggatcgacgtccacccgcgtgaccttgatcggatagcgcaccagggcgcgtttgacctgctcggcgccgtagtactcgtccgccgtgatgtccagcgtcaccacccagtcgcgatcggatacggtgcgcacgcgcgccgtggggtcgtcgccatagccgcggccgggaatctcgtagatgccgcgcacgcgctgacgcagctcgcccgtggagcggcggtagtcatagtccgcccgcaggaaggcctggcaggacggggtgaggtacggcgagagcgtatggaggttgcgcgagtagtcttcttcgccattggtcggccagcggttcagcgtctggaacacgtagaacgtgaacgcatagaccgattcgggcggcacttcccaccacttgcgggtactgccagagcgcaggtcgggcgggacgtggatggtcaggtcgcgcggcgcgctccaccagccgccgcccatgaccagggcgacaatgaccagcgcgcccgcgcccaggcgcaaggtcttgatgtgcgcctgcaggtgggcgatctcgttcttgaagcggctcatcgcatgctcctgcgggtggaccagaagcccgagcgcgagatcagcacgtggccgcccacccagccggccatcagcggatggcgcgttgcgatgcgccactgcaactgtcgatacagccaggtgtcggggcgcccacgcttgaggcggcgcaggatgccgccgccgatgaacacgcccaaggccacgcccaggacaacgaacgtcggtgcgatggcgatcgtgcggaacacccacgaaagcggcgcgccgaccagcaggccggccgcgccggacaggccgcagcagatccacagctcgtcggcggtgaggccgcgcacgaccacgggatggcggttgagccggtgcggaaggaacgtgaccgtcccgtccgcacggacgtgctgctgctcggacataccggcctcgcttacaggatgccggtggcttcggtgagcagccagatgccgatcacgagcagcacggcgccgatggcgaccgtgaggccgaattggccccacgtcttgcggccggtgtggatctccgcgtaggtgccgtaggcgtggtagcagacgccgatgaacatcgacgccaccaccagcagggccacgagcatgatgatgtcgtagccgtagttgcggatggtctccatgatgccgttgccggtgccgcgcgtcgggttctccaactgcggcagaccttgcgcgaacgacagtgcgggcagcgcggcggcgcccagggccacggcggcgcgctgggcaaaacgggaagtgaggttgcggttgtgcatggtcgggcctttcatgtcaggacaggaggaagaaactcaggacgaggtacatcgcgacgaagcggatgcagacgccgaggaactggcgctggttgaggcggctctcggaccaccccacataggccgttcggatggcccagacgccccacacgagcaggaccgcgaacacgacgccgaccaggacggtcgccatcgcggaaggcgcgataccgctgttggcttgaaatgccgagacctgggcgccgttcattgctcgccctccgcagtcgtcttcggcgatggcgaagcggcccgctcggtgcggtagtcgccggccagttcggaggggtcgcgcggctgagcgcgtgatggcgtcaggtggaactggatgccggcgcgcacgcgcgccaggtcagccagcagccgtgggtaatcgaagtggtagcgctcgcccggctggatgggggcatgcgcggcgctgtccgcgacggtgcgttccagcgcgtcgagctggcgcagcgcggcgaccaactcctggcgctgcgccggggactcggccaatgccatcggggactggcccagcacgagggccgtcacgaaaaaagtgggcacgccgcgatgcgcggcgcgcagccagatcgaagccaccatcgcgccattcctgtgtgatcagcaatgggttgatcgtggagatcagggctgtttcaggccgcaaacaataggaactggcggacgaccggattgggcatgctgcgagcgaacctacaaaagcacgggtcgcgcttcgattattgcgtttttcgagtatttcgaatatgatcggctctgcaaccgttttcgcttaggagctacccatgaccaccgccactgcccaatccaagatgacccttcccgccgcgggagaggtgaaggcagccgtccagggtcaacgtgccttggcggcttacctcgcaacccagttcgagacgcagcacatccagatctttgatgaccacaaacaggctcatcaggtggaactgcctacctcggctttacgcctgctggtcgacatcctggccgagttggccgatggcaatgcagtaaaggtggtgcccgtccatgcagagctgacgacccaagaggcggcggacttgctcaacgtgtcccgtccccatttcgtcaagctgctcgaagatggggtgttggcatttcatcgcaccggcaagcaccgcagggtgaggttcgccgatctgatgcagtacaaggaagcgcgcgagcgcgccagtgagcaggcgatggccgaactcgctcagcagtcgcaagagttgggaatgggatacgaatgaggcattccccattcaccgccgtctacgacgcgtgcgttctatatcccgcgccactgcgggatttcctgatgtggctcggcctgtctggccgcttccgggcgcggtggagccaagccattcatgaggagtggaaacgcaacctgttgatcaaccgccccgatctcacccgggttcaggtcgacaggacgtcggatctcatggaccgggcaattccggacggcttggtggagggctacgaagcgctcgtggcaggcctgacattgcccgatccggacgaccggcacgtcctggctgcggcgattcgctgcggtgcgagcgtgattgtgacgttcaacgaacgggatttcccgaacgatctgctggctccgtacggcatcgaatcgcagcaccccgatgagtttgtggacaacctactggatctggacgcggccgccgtggtgtcggctgcgcagcgccagcgtgcccaactcaagcatccgccgatcgaggtggaccgctatctcgaaatcctgctgcgccagggccttgtgcaaacgaccaaggtgctggcgacctatcgcaccattctctgacccgccgagagccacggatgaccaagaatccttcatcagacgccactttgccgaaaggcatccatcgaagctggaagctgccggacacgtcgctgggcgccctgtgggattccatcgtcatggacgaagctctcaagaagcagttgctgtcacaggcgatcgtcaacttcacggtgcgccccaaggtggagcgcacggtactccccctgcacggcgtgatcttgttggtcggcccgccggggactgggaagacctccttggcacggggcttggcgcatcgtgtggccgaatctttttcttctgcgaagtttcgattgctggaagtagagcctcacacgctgacgagctctgcaatgggaaagactcaacgcgccgtggcagacctgttctcgcaatcgatcgcagaatccgcagcggcgggcccgacgatcgtccttctggacgaggtcgaaacgcttgcggctgatcgagccaagctcagcctggaagccaacccggttgatgtgcaccgggccaccgacgcggtgttggtgcagttggacatgttggccgaacgcaacccgcatctgctgttcgtggccaccagcaacttcccacaggccgtcgacagtgccttcctatctcgttgcgacatggtgatggaggtgccactgcccggcaaggatgcctgcaagcagatcctggtggactgcctgaatggcctggcaaagacatttccggggattggcaagctttcctcggctcaccagttcgacgcgtgcgctggcgagtgcgtcggattggatggtcgggccattcgcaaggtcgtagccaacgccctcgcggccgacccgcaagtggctatcgatccgaacaagctttccgtagagcacctgcgcagtgcgatacgacaggcaacgcaaatgcgccttcaaggagggaagcaaaaatgaccaccgttgtcagccggacgtttcgcagctcgccgcaccgcgatgcgttgcagacgtgggatgccattgtcgaactgctcactcagggcaaggacggcacggctcgctctgaactcagggccgtggcgggcgtggccgccagcttgatcgccgaccaggcacccaagagcgcgcccatcgttgcgacatgcgatggaccacggaccaggatctactgcctcttcgacgaagacgcgatcgatggtgatgatgccaacgaagaagtcttggggttcgagccgttgaagggagactggggagtctcgctgccgtgtccgaaggagcagctcggctgggtgcaaaccgcgctcaaaaagcacagttctcgcatcattgcacgggacttgagccaaggaattgccacgcaggcgcaggccgatgctggacaagcgctgtcgctcgacctcggaggtttcctcaagtcatgagcaccgtcgccacctactcgtacacgcactcggttacctatgtgaccgacaacatcctcaagagcttgaaagacatcatcctgctcagtgggctggaccccgagcacttcgcggatcgctgggagagcaatacccgagccatcaagacgtggctcgggaccggtgatctgcgcaaggtgattctggagatctacaacccggcaaccgacaaactcgtgacccgatgggatatcgacatcgtgtatgggtggtccgatggcgacggcagcttctggacagataccgagcagttgaagtacgcgatcaagaaagctgggctgctgccatcgcaggccaagtacaagttaatgctcgatacaaagccagggcggcctgatgtggaggggtggagcaaaggaagttatcgctcgacggatggaatggtcaagcagagcctaggctcgactgtcgaacacagcggcctggcgggtcaggccggatattggaggcaacgctgatgctgtcgatcgatgaagcttttcgcaagttcaagtcgcgtctggaactcaacgaacgcgaacagaagaatgcctcgcaacgccagaacgaagtgcgggactacctgcagaccaagttcggcattgcgcgcagcttcctgaccgggtcctatgctcgatacacgaagacgaagccgctcaaggatatcgacatcttcttcgtgctgaaggactcggagaagcattaccacggcaaggccgcatcggtagtgctggatgatttccactctgcattggtggagaaatacggttcggcggccgtgcgcaaacaggcgcgctcgatcaacgtggatttcggtgttcacatcgacgcggaggacaacacggactaccgggtggtcagcgtggatgcggtgcccgcattcgacaccggcgaccagtatgagatccccgatacggcgtccggaaagtggatcaagacggacccggagatccataaggacaaggcgaccgcagcgcaccaagcctatggcaatgagtggaaaggtctcgtgcgcatggtgaagtactggaacaacaatcccaagcacggcgatcagaagccggtgaagccctcgttcctgatcgaggtaatggcccttgagtgtctttacggcggctggggaggatcgttcgatcgcgagatccagtcgttctttgccacgcttgccgatcgtgttcatgacgagtggccggatcccgccggacttggcccggcgatcagcaacgatatggatgccgcgcgcaagcagcgcgcgcagcagctgctgttccaggcgagccaggacgcaagcatcgccatcgaccacgcgcgtcgtggtcgcaatatcgaagcgcttcgcgcctggcgcgcactgtttggccccaagttcccactgtcctgattccatcggcttccatacacgtcccatcgaggtacagcatgtcccagtggtcgctttcccagctcctgtcgtccctgcatgaagacatccagcagcgcttgtccgtagtacgcaagaccttcggtcacccgggtacgaagggggatgcgagcgagaacgtctggatcgacatgctggatacctatctgcccaaacggtaccaggcggcgaaggcgcatgtggtggacagcctggggaacttcagccagcagatcgatgtggtggtgtttgatcggcaatattcgccttttatcttcacctacgagaacgagacgatcattccagccgaaagcgtgtacgccgtgttcgaggccaagcagacggctgacgcggggcttgtggcctatgcccaggagaaggtcgccagtgtgcgcaggctgcaccgcacgagcctgccgatcccgcacgctggcgggacctacccagcgaagccgttgattccgattctgggtggcttgctcaccttcgagagcgaatggagtcctgcattgggcccatccatggacaaggcgctgaacgcaaacctcaccgaggggcgtctggacatcggatgcgttgccgcccacgggcactttttctatgaccaagccagcggcgcgtacagctacaccaacgaaaacaagccggcgaccgcgtttcttttcaagctgatcgcgcagcttcagttcagtggaacggtccccatgatcgatgtggaggcttacggtcagtggttgaccaagtgaggggtcgctgtggcaagcatacgttcggagtaccaccggttcctggcgcacttgacgcagcggcacgtgcacgacgacgtgcgccggctggcgcacctggtgctcgatcacctgcagccactggccgaggtcggtgctgcacgccgggggcgctccacgcgcttggcgccgctggccatcgcgcatctggcgcagatgcctgtcgcctacgacggggacgcgcgcggccccgaaaacgggccggcgctcgggcgactgcaccagctcgaagtcgggccgtttcgaggattcatgcggcaggagacgttcgacctcagccatgacatcaccttggtctacggtgccaacggcaccggcaagagcagcttctgcgaagccttggaagtggcgatgctcggttcgatcagcgaagcgcaggccaagcgggtcgaccagcggacgtactgcaacaacgctcgcctgcgccgccacatcgcgccagtcctgtcgtctacggcggcgggcgaggcgcaggccgtccagcccgacgaagctgagtatcgcttctgcttcatcgagaagaaccgcctcgacgatttcgcccgaatcgccgcgcggaccccgagcgatcagcgccagctcatcgccaccctgttcggcgtggaccagttcagcgagttcgtgcgcggcttcaacccctcgctcgatcaggacctgatgcttgccggcgtgcaggcggcgcagctggcgcagcgtcgcctgcagttggcgaactccgaacagaccatcgccgcctacccgcagaagatcgcagcggtcgagggcctggaacaagctttggcgcagcgcatgtcacctggcgcgacctatcaaacctgcgtggactggctgctgggtacgccgcagcagcaaggacggctaccgtatgtccaggctcagctggacgccaacccgcctgccattcacgaggtgacccaggcccgcctgcaagcgttgctggcagaggcctaccgcgtccagggactgtggcaagcgtcttccgcgcaactcgcggcccgcgccggcgaggtgtcgtacgcgaagctctacgaggccgtgcaagcgttggcggacggggcgaccgcgtgtccggcatgtggaaccgaactggccgccgtggcgcaggacccgttcgccagggcgcgaatgggcctggagcagctcgcgcaactggccgtcctgcagcagcaggaggccgggcatcggacgcagttgagcgaggcggtccgagcgctgtgtgacgaaatgcgccgcgtggtggcggcggctggggtcgcttgtcctgccgaatcgcaggccgcgggcctgccactgctgcctcccacgtcggcgggcaattggctcggcggcggggtgaatggggaccagcgcgcctggcaagccctcttacggatcgcacagatcatcgaaggcttcgacgcgcaggcgcgcgacgtgaatgcccagcgcggcgcgatggcccaggagcgggaccgcctgcaacagcatcagctggagatcgaacggctgcggaccatgcgcacgactgcggatcaggagctggcggccgcccgccaaaccgtggcccaattcgacgacgcgaaccgcggcctgatccaggcggccacggacgaaatgccggtggtggtgcaccatcagcgggtcaaggccgcctacgacggcttcctgcccgagattcaggcatacctgaccgctctgccgggggttctgctacaggggctgggagaccaagcccgccatctctacaacgcattcaaccgggccgatccgcccggcgatctgctgcacgcgctgtggttgcccgtggccgagaacggcaagatcgaggtggagttcgccggcgagccgggcgcgcgctacgacgcgttgatcgtcttcagcgaagggcacatcaaatgcctgggcctggcgattctgcttgccaagaacctcgcgcagggctgccccgtggtcatattcgatgacgtcgtcaacgcgatcgacgacgaccatcgcgatggcatctggcgtaccttcttcgaggacggtttgctccacggcaagcaggttatcctcacctcgcacgcagaggagttcctgcaccgcatccagcaggagttgggcgtgcgccgcgccgcggccattaagcgctacaagtttctcccgcatcagggagagcacgaactgcgggtcgacagcgacccgccagcgaagaactatgttcttctggcccagcaggcgttggcggctgacgagaaacgcgaggcactgcgtcaggcccggccggcgctggagagtctgacggaccgcctgtggacgtggctgggtcggcgggcggacggccggatcgacatcaagctgagcgggccccgcgcgccttgggagctgaacaataaatgcaccaagttgcggtcggccgtcgagcgtatcgcggcgcaacatgcgggtgcgccggatgccgtaggggcgttggtccggctgctcaatgtcagcggtacgagtattgaatggggttacctcaatagcggtgtgcacgacgctcagcgcgatcatgagtttgatcgggcgacggtaagaacggtcgtcgaggcggttacggcgttggatgctgctcttgataccctgcagaaccgatgaacggcacacggctttgcagagccgtgccgcccgtgtcacctcataagtacttcttgaagctgcctgcggtcaggctgactgccatccccagcaacgccgcgctgggcagcaggatgaccagaggatgcaccgatatgggcagagcgagataggtgacccaaggcagcacggccaacggcatcaggctggccttcgcgcggtggtagatgaagccgaattcgcggcccgcgccgaaccggcgcacatcccgtcgcaccaggccgtcaatcaggccgacgaatgccgccgtgaggatcagcggcagcgtgagcaccaggaccagcaggcgcaccaggaaggtgagcgtcgtgaaggccgcagcgatcaggtagctttcggcccagacatagacttggctgatgtagtagcggaagttgcggctctgcccgtggctgggcgcgcggacgcgctcggcggtctggctcatgcgctccagcaaccccgagcgcacgaacacccactcgtacccggtatccaccaactcgtgcgccgtgcgcccgggctcctgtaccaccacgctgcgcgtgaagtggttggacaggtgcccgagttcgtaccgcagcatctgctgggagtggcgccagccctggtccttccagaacaggtgcatgccggcgcactccaccacgatcgagaacagcagcgagccaatgagcaccccgagcagccggaacggtaaggtgatggtgccgacgatcaagccttggcgatggttctgctcccgctgcgcggtcgaggcggcatccttcatggcacggcctcgttgcccgcgccatcgtcggcgccggtggccaccgcgccgggctcggccgcagcggcatcgtccagcaggtcgtcgggcaaggccgcatcctgcaaggccgacgagctggtgaactcccaccactgcgtggcctcgctgtagctctggcgcatgtacccggccagttgctgcaggtccgccggcatcacttcatccgggtccggcgccggcagcggcatacgcaccttccagagctggccgccctgcagcagcgcgaagcactggcccttgggcaggccgacgacgtgtgacggctcgatcatcggcacgctggccatgctgatgcggtcctgggtgttcgacgtgaaatccgtcgcgccgcggatgtctgagctgtccgtcgcgcccgagacgatggtggttgtatagacctcgaccttcggcaactgcctcgtcagcagttccgcggtggccgtctcgcgcacgcgcaacatgaataaattgttgaaattcccgatcacttggccggccttcgcgcgatttccgatgcgggcctcgatgtccgagagcgtctgcgtgtacgccgtgacttgcaggccggcaccgccgcccttgttgatgagcgggatgaattcatcgcccatcagttcattgaattcgtccgcgtgcacgttgatcggcacgcgagcgccagccactgcgccgggcaggccatcgtcgattccgtgcttgtagatgtgtccggccaccgaaaccaggtcagagaacatcgaattgccgaccgctgcggcgacctcggcgtcagacaacgcatccagacccacatagacgatggcccgctttcggatgacctgcatccagtcgaagatcgggcgcgggtcggccaggtcggagtagttcggcgccaggagctgggcgatcttgccgctcgtgagcttttccagcagcggcagcagcgatgcaacgatcttgtcgaagtaggtcttgtcgtagcgcaccgccgagcgcaggccatcgagcacagggtcgtagttgcgcgcctgggagaggtattgctccagcgccaccacacgcttctcgcgcccgatcatgttccttgggatgttcttctcgttgagcttggcctcgatctggacgatcacctcccaggccttgggctccgtcttggcaaagtagtgctgggcgtactcaatgaacagcgcgtcgatgttgatgacgtggcgctggatcagcatgtagtccgggcgctgccccagttccaccagggcgcgggcgatgatgttcacgaagcgccatgcgaactcgcggaacgccgcgctgttgccttcgccggagagctgccccgcgatgcgtgtcgccacttccgagatccgaccgaagcggcccacggcgttgtagcgggcgctgatttccggccagcccaagtggaagatgtagaactcgccttcgcggccagcgcgctgggcttcgacgtacatccgtttcaagagatcggcatcccccttggggtcgatgacgatgacgacctcatgctcgccggcagcattcctgcgacggatgtcctgcgtgacgaacaactcggccaggcgcgtcttgcccacccgcgtggtgcccagcaccagcgagtgcccgacgcgctcgcccagcggcaggctgacgtccacttcgtcgggctcgatgccgtgcagccttggcaggccgccgacaggcggcaacgggcgcacggggttgaaaggcgcgtcccagccggtgagcttcggcaggcgcgagagcggcaatggcgcgaactccagccgttcctccaggcgcctggtcagccggtaggccggcgtcggctcgacgtagcggcggaactcgggccggtacgtctgcatcagccgatgcgtgtgcttctgctcccagagaaagccgcgccccacgaataggcgctgctggctgaccggcacgtccttgctggtcatcacgtaacgcggcagacggcggatgttgcgccggtagcgcaggatgatgcgggcatcgcggtagcggatcgcgccgtaggcgccgaacgccaaggcgctgccgatgcccatggccgggctcagcgcgagcgaccatggggccaccaggcacagaaacgcggcgcctgcacacgccgcgacggtgtatagctccaccgctgggcgtagcagaacctcgaccggctgtttgcccgacatggcttcattgctcgatgccggtggccgtgatcagcgccgggtagtgccgcaggcccaggcgatcggccaggtcgtcgccggccacgggcgcgagcggcacgcccggcaccagggcgcgcagccgcgccaggccctgcgcggtctcgacgttgacgaccaggccgaccgcgccacgttcgcgcaaagcggcggcgcggcgctgcaaccaggcccgggaagcctcgtcgtcgccgatgaccacgaacggccgcaggccgggcgcttcgatcacccgtcgcgcgacggtgccgggcgtgagcttggcgctgcgcaccggcagcatcgcggcttcgtccgcccgtgtggcaggaacctggggcgtcgggatggacggccgcgccggtgcgttggcgcgcggctggagattcagggcttcgtagtacggcaatgccgacgtgccgccacggtcctcgacaacgatcagtggctcgccggcacgcgaggccagcggcaggcctgacagcagcatgagtaggcccgtgaacgcgagatgggcgggatggggtttcgtcatggggaggtctcctggcgcgccgcgaggaccgcggcggctggtcgcgtgccctgcacgcgggcaaggtggcgcgacacgctgcgccgatagcgggcggcgggctcgccgcctgcggggcggtggtagcggccgatcgccagcagccagtcctcgccgggggtgtgctgctccttcaggatctcggcggcaacggccaggttgcgatacggatccagcaggtcgcacgcgccggtaaagcggtgcttgtggtagccgaggttgatctggcccaggcccgcatcaatgcgcgtgtgcggcgtggcgcgcatcgcctgctgcaggccagcgcaggcgtcggcgcgcgtggcgaagcggcgcgactggccggcgacgttgagggaccacggccacggcaccaggcgcccgttgcgccggatgccgctctcctgcaaggccacggcgtagagcacggtcgaggggatgcctgcgcgctgggcggcaagctggtaagccggtggcggaacctcctgggccagggcggcaacggcatacaggccggcagtgagcaccagtgcgcgcaggggcatggctacggctggcgctgccattggccgttcacttcgcgcacggcggcgggcagatcgccgggcaggcccagtgacagccagcggccgccgtcgtggttgagcgtgatgctgccggcgcgcacgcgcgccgggtcgatctgcgcgcgcttggcccagtcgcggatgcgcgcgtcatcctggcggctgcccaccatgtacaggtcgaactccgcgcccgaggattgcaggcgctgcacgagctgtccgcaggctgcgcagccgtccttgacgaacaccgccatgcggccgctgccgcgcaagggactgctggatgggccggcgcccggcttgtcgtcgggcaggttcacgcgctgcatccccggattcaggcgctgccaggcctcgtcgtaggcgcgctggtaggcgagcagcttctcgacgcggcgcgcttccacctgcacctgcagttccgcatagcggcgccgttcttcgtccgtgcgagcttcgatgcccagggcggacagcgggtccaggttgggcgagtagatacccagcggcccatccatcagctcgcggtagcgtgcccattcttgtggctgcaagccccattcggttgccacccggtcgtccagcacgcgggcggccagcgggcgctcctggctctgtgcgttgcgcgccgaggtcgttgcgggctgctgcgcccaggcgggccattgcgacgacgccaccaggaccgcgaaaaggaggatcgacggcttcatggggtgctccggtcagggaatcgccacgcggcgggtctggttgccggcctggaacactgcggtgttgccctcgatcgcctgcaggcgccacgggccgaccgcatccccgggcagcagcacctgaagttgggcgggcgtgaagtccccgatgctcggcgcgacggacacgctgcgctggccggcgcgcagttcggcgccgacgacgcggaatggcagcggcggcagctcggtcttggaggcggcggacgtgcgcgatgcgcgccgctgggcgggtgcggtggcacgcgcggcggcttggcgcgccttgatctgctcgacctccgcgcgcagcgcctggaggtcgtcggccgctgcgtagccactgagagatttctcgacctgggccgcgcgtgcttccagaatctggcgggtgtctttgaggtcagcgtccgtcgcgacggccgggcgctgctggatggcctcgatcgtctcggccaagccagttgcctgcgcttccaggcgttgcaggcgggaatccagccgctcctggtcggcctggtcgctgagggcctggtagcccagggccgccaagacgctgaggaagatcaaccagagccacatcaggctctgcaccaccacggcggcggtcgatcgctgggcaggttgcggggcgttcatggctggcctcccgaaaccatgggtgccagcgggaacgtctgcaccgcctcggtggcgggtggctcggatggggactcggcgaccgcgcgatcgccgggccgctcgaagcagatttgccgtgcgcggtcatccgcgtgcagttcccaggccgggccagccagcgtgagcagcgcatcgcgcaaggtcatggggccgaggtgcaggtgtaccgccggcaacggcagcgcgtacagctcgatcacggcatgcgcggtctggcacaggccatagccgctgcgtttgagcacgtgccgaagcccatccccgaccgtggcgcgggcatcctcgggcatggacacgtcgatggtctgcaacaacaggtcgcgctgcgccgccatgggtgccagttcgaccagtgtgtagcgggcgtagcgcacgaccgggatgtactcggaagcctcgggttcaggcgcggccaagacttccgcgatggtgtcgggcgcgaccggcgcagtcgtcgtcgcgcagccaccggccagcaccgaccacagcaggccgagaaatcccgccagaaggcggcgttcgggatagtgaaaccacggtggagaggggcacatagctcggcgtcctgaaacatccagccctcaccatcgccgctcaggccgcgagcggcagcaaacaatgcgaaccaggcagcgtccgatttaccgggagcggcaaaaaaaacggccccgaagggccgtaagtggaacgtgtcatgcggcgacaagctgccgggccagtgcgacctcgacggaatcaccgtcctggttcaggacatcgagcccggattcgggcacgtcgcccgaggtggactgcgagaccatgatcttcttggccatcagctccaggcaggtcatctgcgaggaaccggcgtagccgaggtagatcacacgcacgggctgcttctgcccgatgcgccaggagcggcgtgccgcctgctggagcgagtacacgttgtagcccgactgcatgaacacgatcgtcgggaactccaacaggtccagccccgtcttgaccaactcggggttggtgatgagcacgtcgatgccacggtccagttgctcggcgatccagtcttcgcggcggctggcatccacgctcgcgcgcagcaccgccaccttgaagccttcctgctccagcaacaccttcaggcgcgacgtggtgtcgcgcgtgccggtatagaccgtgtaggccaggaccttgcggccctgcgccttctcctctttgcagatgtcgatcagctcacgctccttggggctgatctcgaactcgttgaactgagccgggacaaacgccaaggtgttgcgcgtgcgcggatgcaccacggtctccgaccggaagcagcaatccggccaggccagcagcacgttgaggaccacacccagcaaggtcgtatcgcgtcgcgccagagcctgtttcagctccgcggtcagccgacccgccagatcgcggtaggccgcggcttgcgccgtgtccatcgcgacttcacggaactcctcgtcatacggcggcaggacgttgccaccgatgtccttgagcttgagaaagatcgtgaacggcaggatgcagcgcagcacgcccttggggccaaaccccggggccttgaccatgcgcaccgataccttggtgcccttggccgtcttgtgcgccgtgccggtgctctcggagtagatgtccttcaacaccccgtgatcgcgcatgaacgccatcgcagccgaggtcatgctgccgctcgtggtcgggcggtagccgtcttcgatcatccgccccggaagggctcggaacagcaggtggaacaggtcgtccccgtagccgcccatcaacgtgccggtcagcagcaaggtcttgcgagccttcgccgccagcacgcccatggcctggccctgggcactgcccccgttcttgtactcatgtgcctcatcggcgatgagcaggtcgaacgtgccttgcggcaggtagcgtttgatgaactcggacggctgatagccgccctcgccaaagccgaactccatgttggccatcgcacgttccatgcgcgtggcctgacggtcggaaaacaccagctcgccgttgccatccatgaggttgatgaactcatggatgttgtcgccgagcatcgacgccaggaacccgtcaccgaacttttgcatcagcttctgcgcggtgacctctccgatggtcggtatgcgctttaaggctttgagcacggccgaggactggtcgctgccggacagactgcgcgggcggatcagtgtccacaggggcgcggcgcagtggccgcacttcctgcggcactcctcggcttggagcgcgatcgggttgaccggctcgccgtcgaggtcggtgatgaccgtgccgcagtccgggcaggccgccacgtcgccgtggcgggtgcgccgcgtggtgaagacaggcttccagtgaaagcccatccgcatcctgacgcgccccaggacgaagaactcctggcccgtgggctgcacgcccaactgctcgcgcagcttgatgagcttgacgagcgtatccggcccgttgagtacccacaccttggcaccggccaccgtctcctggatctcgcgccgccacttgtaaaccaggtggggcggcgacagcaccagagtgcggcgatagccttcggcgttgagcacggcggccgcaatgccgacggtcgtcttgccgcagcccatctcgccattgacgatcgcagcacgttcgccacggtcgatcagcagctcggcggcggcgtggacgacttcggcctgggctgggaacagcttgcgcttgaggctggcgaccaccagttgccggtgcgcctgcggttggccggtatagaccggcggattagcgctgttgagggcgtcgagtagttcgtcgccgaactcgccgacaaaatcctgaaggctcagggtcagaggggaagattccgcgtcgagcagttcgccctgtacgggcgcggattcagcggcagtggtttcgagatcgagggacatggtgatgctccaaagaaaaatggggcatgcaccacccccagcggggcaatggcatgccccgtggtgggaagagaatcgacgcgtggctgagggtggttgaaggtgctggcctgggcggcccgcaggtgaaccgtgctcagtcttcggacggaagcacgatgacggttgcgcagcgctgcgaatcggtgacgatgcgaatggcgagccccggatggatcacgtagtgcgattccagcgacgcgcccgattgaagcgcgctgctgttcgtctgccattgctggatgttgacgtcgccccagtcgccacgggtgtggcgcctgaagtacgggatcgggtccaggcgacccgcgcggaccaggcggtctacacctctgctgaagatgagcgccccgatggggaacgccagccgctggcagtaggtttcgatgcgatgcgatgccatgggctcctccttgatgagtcattgagccacgacacccctgccggagtgaagtggctccgtcaggtggatgaggatgacgatgtggggcctcagatcaggtcccgctcttcgggaagctggaccaccgtggtctggtggtcctcgctggtcttgacgatcagcgccaggtccggcgtgatcctgaactgcgagatcattaggttgtcctgttggatcgccacgtcgttggcttggcgtgtggcctcatcgatctcgccccagtccccgcgcacatggcgctggacataggccaaggggtcgatcaggcctcgccgggccagccaatgcaccttctcgctcaacttcaacgtactcggtgcgaacaacggttgcttgtgcggcgcaggccgcttgaacggattggggatcatggtgtttctccttcgagttggtacagcaggacggcagcgcgtccggtggatcagcgaatggtcaacacctcgccccgtgtcgcggagccaggtgtcatgtcccacgcgcggatgacgggaacgaacttgtcggtgaggatgcgggtctcggcgatggagccgtcttcgcgttcggtgaactcccgctggagcgtcttgtccttgtgggtgtcacctttgacgacgagcacgcgcccggtcttggagcgcacaacccccgagatcgcacccgcggccagagccagggcgagatgccagcgggacaaggcccgcgccggtggacgcagcgattgctgcgcagcccccaggtgcgtgtcctgcgatggccacaagccttgcagcctgccaacctcatcggcgaactgctcgggctccatcgtcacgcggaagaaatgctctggctcggccgggctggcggggacgatgtacggcaggaacggccactcgctcggcagttcctcggcttcgacttcgccttgccctacctgcaacagcagattgcgcacggccttgacgccatcgggcacctgctcgcgctggcgcacccggcgtccgaagatcaccacctgcttgaactgcgtctccaccgctcggtagatgcgcaggtccgtgtagtggcgcgtcagccagccgaccaactccgcgtcgagcacgtagccggggacgatgaaaaccagcacgccgccgtattgcagcagcgagagcgtgcgctggtagaacagcttttcaaggcgggcacggccctggccctgatagccgatgttgccgttgacgtccttggacaggtccccatacggcgggttgagccagagcagcccgaaggactgcttggagaccatcgtgtccatcaggtccgcgtgcaggcagtgatcgaccaggccgcgggcatggcgcgcccgctccgcgtcgaactcgacggcgaacgcctttgcctgctcgcgcccgagggcatgggcggcttcggcgatcgccacgccttcgccggcgcagggatcgaggatgcacatcggcccgtcgctgggcatcagtgcgttgagcgctctttcgagcgtgggttcgtcggtcgggaaatatccgttcttgacgaaattgcgggcgagccgcgggaacatgagggccatggaagtctcctggttggcggggatgaaacacggaagtacgccaaggcgtgcctccgagggtgggtcaagccgctaccgcttccggcgtccaaatcttggccggatacggataggcggtgagcgcgtcgctgcggatcagggagccgagcgccagggtcagcgccggcacgtcgatggcgagccgatggccttccagcggcccgagggcgaacggaaggcgggccagcatctcgcgggtttgcagcagttccagcacggtctcgcgccagtgatcgagcagcggcaacgggcaggtgtcccgcaccagcatccacaggcggtcaagcctgtgggcgctgtcgcgtggcagcagtgccaatgcgctggcgttggccttgtcgggcttgacgcagcgccggtcgaacagccacacgttggacagcgagccgaacagcgtccgccggtacgcgcgcgtgatgcgcttttccaggcgatcgacgttgccgatgaataccgggacgctgccgccctggtcggtgatgacgtggaactggtccagtccctgctcgtcgcgcccgagggtcaggcgagcgaggaactgctggacggcggtgtcccgcgcccagatggacaggaagatcaggttgccctggtcatcgccgacgcaggcgtcggccatcacgtccgggcattcgtcgatgcggtacagcgtggaagaagtgtttgcgggcatggtggtgtcctcggatgaacgggaacagcaccgcccgctggggcaagtactgccccagggggtggaagaaaaccgctcagtccggctcgaactgccgggtgtgcgggttgaagtgaagcggctcgtccgccgaagtgatcggcgtgaagccttccaggtagatgttgttgaggtactggtcgcggtaggtcagtgcctgccgtgcctggtcctcggtgaggccgttgtcgatgaagtacgccagcatttcctcgtcggaggacacttcgtcgttggacaaactcccttcaacgagtgccagcaacgagggcggaagcgttgccaggatcgggtccatgtcggttcctcctggctcaggccatcgacgccgcggcggatgccgcggatgccgtgggtgtgcgccgccgggcgtggtaggcgcgaacgcctgcacgccagtcggcggactgctccggtgcgaggtccagataggacagcgggcacgtgtagtagtacgggtgcatggactcgtccaaggacttgtagccccactggccgccgcttcgttcaagcagatcgcagcggatgtagcgcagggactggcccggtgcgagatcacgatgcacgccttcgaccttggcggtcacttcggcgacggaccacagcacgttgccgcgcagggtgtgagcgatgaccttgacgctggcgcgctcggtctcttgcggtgcgatcagttccgcgatcagttcggaccgcgattggtttgagaaataccagcccatgagaggcctcctcgaaaagttgagctgaaggcctccccgtggggaagaacccccagcgggtgatggaatgccgcatctgcggcgaaggaacctatgcgtcgccctcaatcccagtcgtcatcgtctcgatcacaaccggccgggcagtagccgaactcgatcccgtgcgagcaatagccatgctccgcattccagtcctgggtttcctgccgttcggcaggtgttgcgtagtcccattcctgggccgcgatttcgagagcctgagcacgttgctcatccggcaaacgattggcctgtgcgtcgatcgccgaactgaagagcgtcacgtagtggtcgtaggacaagccgcaaccgcgctgggcgtgtgcggcggccgctttgcaaaggtcccgccacgcgggttcatccagcgttgaacgcggggtatcgcaagcgatggtggacatgatggagacctccagaaaatggccagggcctcccccgcatgggaaaggaaccccggcgggtggatgaagaacaccgcgcatgcggcgtctgcgatcacgcaggttttggttcggcctggcggctccactcctgcgtcttgaagtccagcgcgtagcccagctcgcccaggcgggcgatctgcgcgcgcagggtgcggcggtcgatggtcgaatccagtttcacggactcgcccagcggccacagcaggccgaagagcgcggcgtcaccgtcttcggtgctgccgggggcagcggccgtagcaggcggtggcgcatccacgccgaagggcgtggtatcgaccagcgggtccgcggacgcctgcacgggtgcgggcttggcgggcctggacgctttggtgggcttggccggcgttgccgcaggctgcgccccttgctcttcatcgagcggatcgacgtcctgggtggcgaagctgcgggcttcgtcgcggctgagtttgtcgatgccgttgagcgtcatgccgtcgaggctggcacggatctcgaaccgcatgccgccgccgaccggataggacttcgggaagatgtacctgatgatgaattccccgtcgtacttgccttcggggtactgctccagctccgggtctttgacctcgaaagtaccgaggtgcgtcgcgaggcggccaaccgtgaacgggccgttcttgccgcggatggtacgcagcgtgagctggccggggacgacgatgggcgcaacagatttctcggaagccgatggggttgccatgatggttctcctgatgatgaatgacgggccgccgacggcacccggtggatgagaggaaatggcctcgcccgaggtgggcgaggtccgcgtggcatcacgccttgagctggcgcatgccttcggccagcagccacaacgcccggttcaggcgcaggttctggtcgatgccttgcaccggacgggtgcgctgattgcggccgttggccgtgcgtccgttcaggccccctttgactaggttctcctggacgcggttgaagacggcccacaggtcgttcttgcggtcgtcccatcgccgaggggccagcagttggctctcggtgacaggcgtggacttggccggatcgtcgtacttgagtgcgagcgcagagttcgcaaagacctccgcttcgccctcatcgagggtgatggtgcgcatcgcatcgcgcgcgttatgcacgcgctcgaaaccttcgaggactccgtaggcaccttcgatcacctggctggccacgtcgcccttgtggggaacgcggatgtctgcggtggtgtcaccgcaaaccaggccgttgtggcagacgaaccggaacatgccggcgagcatctgatagctgctcgtgccgtcatggctgttgagcaggatgatctcgttcgcctcgtcgccgttgatctggcttgcatggcgaagtcggatgaggtgcttcgtgtactcgcgccggtcttcgttgcgcacgcgcgtctgacacaccatgaagggctcgaagccctcctggcgcagcttggtcagcacggtcgaggtcggtatgtaggcataccgatcggaccggctcccatgtggagcgtcggcgaagatcgacggaacgacggcacgaatgcggtcgtccgagagtgggcgatcagagcgcaggatcggggattgcggagcaaagcgggataccagagacatggctgatctcctttgagaaattcgacaaccgcgtggccgtgagaccacgcggaactcgggggatgaaatgcgcaagcacgcgtcctggggacgcggcgtacgtggggaggaaaagcgacaaggccccgtgagaggccgtgccggatcagaacgaagcagccaatgccggctcctgctcctggacttgcgcctcgggctcgcgctcggcgggctcggtggccgtgtcgatggcatcgtcggcttcggacgcggatgcgtcttcggccggcggcgcctcggcttgcgcctggctcgtcggatagacctgggtgccgtcgatcttgatgagaccgatgtggaccagcgtcgattccaggctggcggccggttccccggcgtgctcacccttggtgcggatgtacggatcgatcttcatgtcgttcagacggaaggcgatcagcaccttgcggtcaccctcgacggcctgaacgcaccggcgaaccaggtgctcggcttccggggtggcgacgatggtgtcgaagtaccgatactccggttcatcgacaggcccggccagtgccgcgacggtgcaagagaggaacgagtcgccagcttttggggtgacgtccttcacacgattgagatagccgatgccgcgggtgatcaactcgtgctgctcgatcgaagccagttcggcccggtcgatcagttcggccttgagcagtcgcgccttgagggacgcggcggcctgacccttctgctcacccttgtcgcggatgtacacatcgccccacaggtcaccgaggcgaaagcgcaccagcgggcgctgcttgggatcgtcaacgccgatgtagcgctgaacgagcttcttggcctcggcacccgagaccttgacgtcgaagtagcggtagctggggtcccgggcggggccgaccagcgcggcgatggtgcatgccaggaaaggctgcgcacggcggccgccccggacgggcacttcacggacacgctggatgtagccgatgcccgaggtgtggaggtcgaaatacgatttctcgttggacgtggtgttcatggtgaatctccattgggatgaagcggagacacaccggcccacgcatgcggggaaggtgcgtgaccccgcggtgggttgataaggcgaaagcatccgccaccagaggctggtggccgctcgcggaaggatgcggtgcgagctggctcggtcacgcagtgggaactgcgccgcaacctcgaagaccgatggttgcctggcatgtcgctgacgacgtcagcaggcatggggccagcatggcggggcctcgcgcgcgcggcagcaatcaatcggcacccgggcgcttccctttgtccgcgccacccggcgcctgtcacaggcacttggcgccgcgcaggtgctcgggggtatcggcgcgcggacggccgggacggctccaggcgccgccaccgcgcgcgccgatcagccgccagccggcggcgcgcaggctggcgccaccttcgtcgggcatggtgtaggtgagcaggcgtatgtagcccagcgcccttgccgcctgccaggccgcgccgtagagcttgctgcaggcgctgggtgtgccgtcggtgcacagccgcgtgacttccagcgtccaggtgccgcgcgaccgggcggccgacaatggccacgccgtggatcaggtcgctgtcgctcagcgtgacggccagggcgaacttcgcgccctggaccgggcggtggtggcgatggtgcgacagaacgaatgcattggccgtgcgcagcgacaccggtaggaggtgcagcctcggcgaggtcgatggcgtgttcatgcggttgtctccggtggcatgccggcgttgtggccggcggggcgtgcctcggcggctggagacaaacgcgcacgcgcggcgatggcggcggtgcgaacaaaagaaggcccccgatgcgggggctgcgaggcggttgccgcgtcaggcgggaggcaccactgctaaggacaggtgcgtggcggtggcggaaagcacgagatcgtccgccgagtgctggaggcgcgtgaacaggccgtccttcgggtcgaaatactccgcgaagtcatcgccgcccagctcgcggccggcgaggtgccaccagtcatcgaacgggtcggtgtccgggttgcatccgacggcgtaggcgagcagtgcctggcgcccatccgggcgacgctccccacgctcggcgaggaagtacacgccctgatccttgaccaggacaatgcggcactgattggggacgtctcagaaaacggaaaaaatcgtacgctaagccggttgcagcggtcgtagcggcctgaacttgcccgcgccgatcttggcgctgctgcgccagaggtaatcgccggtcaggttgatgtgctcccagcccagcggcgacaggtactgcaacagggcgtcatcgacagtctggccgtgaccgcgtaaggcgtttgaggcccgttccagatagaccgtgttccacaacactatggccgccgtcaccaggttgaggccgctggcccggtagcgctgctgctcgaaactgcggtcgcggatttcgcccagccggttgaagaacacggcgcgggctagcgcgttgcgggcttcgcccttgttcagtccggcatgcacgcggcggcgcagctcgacgctttgcagccagtccaggatgaacagcgttcgctcgatgcggcccagctcgcgcagcgccacggccaggccgttctggcgcgggtagctgccgagtttcctgagcatcagcgaggccgtcaccgtgccctgcttgatcgaggtggccagccgcaccttggcgttgatcgccttgccggacgcctggaactgctgctgatgcttgtgcttggcagcgttgaacagcttgcccaggatgcggtcgtgcaggtcgatgatttcgtcggtgacggtggccatgccctcgatggcgagcgcaccagggtcgcgtagcggcgctgtgcctcgaacttggccagatcggcgggcgtcatctggccgccttcgcgggcgatcttgagcaggcggttctggtgcaccgaccgctcgatgccggaaggcaggtcgagcgcctgccaggctttgaggcgctcgatgtgttcgagtatgtggcgcgagttcggcttgacgggcgactggcgcagccaggccagccaggtcgtcttgccgttgtcgtggcgcttgagcagatcgtcgaggcggtgccggtgggtggccgacaggggatcggacaaggccgcgtagatgcggcggttggcgcggctgtaggcgttcatcgaacacctcccttttcctcatccggcgcaacaggacagttgcttcacgtccttgttgaaggtctgcgccgcgagcttcagtccctcgaccatggtcaggtaggggaacaactggtcggccagctcctgcacggtcatccggtggcggatcgccagcgcggccgtctggatcagttcgcccgcttccggcgcgaccgcctgtacgccgatcagccgccctgagccagcttccgccaccagcttgatgaagccgcgcgtgtcgaagttggcgagcgccctcggcacgttgtcgagcgtcagcagccggctgtcggtctcgatgccgtcgtggtgcgcttccgcctcgctgtagcccacggtcgccacctgcggatcggtgaacaccaccgccggcatcgccgtcaggtccagcgccgcgtcgccgccggtcatgttgatcgcggcgcgcgtgccggccgccgccgccacatagacgaactgcggctggtcggtgcagtcgccggcagcaaagatgtgcggtgcgctcgtgcgcatggcgcggtcgatgacgatggctccctgcgcattgacttcgacgcctgccgcttcaaggttcaggctgcgcgtgttcggcgcgcgaccggtggcgaccagcagcttgtcggcgcgcacttccccctgcccggtggtgagcacgaattccccgcccgcataggcaacgtggctcgcctgggtgtggtccagcacctcgatgccctcggcgcggaaggcgtctgttacggcttccccgatggccgggtcttctcggaagaacagcgtgctgcgcgccaggatcgtgacctggctgcccagccgggcgaaggcttgcgccaactcgaccgccaccacggaggaaccaatcacggccagccgctcggggagcgagctgctttccagcgcctcggtggaggtccagtggggtgtgtccgcaaggcccgggattggcggaagcgccgggctcgcgccggtggcaatcaggcagcggtcgaagttcacctcgtgcgtgccgccgtcagcggtcgccacggtcagcgtgcgcgtgtccctgaaccgggcctcgccgcgcagcacggtgatggccggagtgcttgccaggatgccttcgtacttggcatggcgcagctcctcgacgcggccttgttgctgggccagcagccgctcgcgcagtacagcgggcgctgcggccggcaggccagcatcgaacgggctttcgcggcgcaggtggacgatgtgcgcggcgcggatcatgatcttggacggcacgcagccgacattgacgcaggtgccgccgatggtgccgcgctcgatcagcgtgacgcgggcgccttgctccacggccttcaaggcagccgccatcgccgcgccgccgctgcctatcacagccacgtgcagcgcttgttcaccgccaacatgcttcgtttcgccaccgagccagcccagcgccttgtctagcaggccggcaggcttgttcggcgtgtcggtaagccgtgcgcgatagccgagcgtggccactgcggcaaccagcggggccacgctcacgcctgcatccgcctcgatttcggcctgccgctgcggataggagaccgaggccgcgcgcacgccgggcacgttcgtcaaagcctgctggacgtgctcggcgcacgacgtgcaggtcatgccttcgatgtggagggtgatcgcctcggccatgattacgccctcactgcttgacgctggacgggtaacccgcgtttgcggtggccttggtcaaggcgtcggcattggtcttggcctcgtcgaaggtgacgacggcctcccgcttctcgaagctgacttcggccttctcgacgccggcgaccttggacagagccgtcttgaccgtgatcgggcacgcggcgcaggtcatgccgggcaccgacagggtgacggtcttggtggcagcccaggcgggcgcgcttagagcggcggccagggcgatgagggtggtgagggtggtgagtttcttcatggtgatctcctttcagtagaacagcggcaggacgtagggaaacgcgagggcaaccagaaccagggcggccacgatccagaagatcaccttgtaggcagtccgcacttggggcacggcgcaaacgtcgccgggcttgcaggcatgggctggtcggaagatgctgcgccaggcgaagaacagcgcgatgagcgctgcgccgatgaagatcggccgatacggctccagcacggtcaggttgccgatccacgcgccagagaagccgagcgcgaccaggacaagggggccgaggcagcaggccgaggcgaggacggccgcgacgccgccggtcgccagtgcgccgcagccgttcttgggttccgacataaggttctccttccgggacttcgcttgatgctgtaacgttacttccgtagtcaactacggagtcaagcgccatggagaacgctcaagagaatctgaccatcggggccttcgccaaggcagcccgggtcaacgtggagacgatccgcttctatcagctcaagggcttgctaccccagccggagcggccctacggtcgcatccgccgctacgggcaggcggacgtggcgcgggtgaagttcgtgaagtcagcccagcgcctgggattcagcctggatgaagtcggccagctcctgaaactggaggacggcacccattgcagcgaggcggccgaactggctgctcaccggctggccgatgtgcgcgcacgcatggcggacctcacgcggatggaagaggccctgtcgacgctagtgagagagtgcaacgcgcaccatggcaatgtttcctgcccgttgatcgcagctttgcattgctgctaaagggcccacttcggctcttagcgtacgatttttttccgttttctgagacgacccctgattggcgatggcttcggtcagcacggggcgcaggtcagcgcctttgaatcgcagtgacatggatgaaatctcctgtgtggaagaatgagaaaggcctccatccgatgggatgaagggcctgtagtgcacgcggccggaacggctggaacgccgtggcggatgcctcgggtcagccgcaggaccgcccggtttcgctgcggggcgtcatgccgggacggcctggcgcttgcgggccgctttcgcgtcgaggatgctcacgtcgatctggcgccagcgcccgtcgtcgatgagcctctccagcacttcgccgagcatgtcgaaatacacctcgtcgtgccgatcgaccagttcgaccgattcaccgttctgacggtgcagttccaccacgtaggtgtctccgccgcggtcgtagaggatcgtcacccggccctcgaacttcgcggtcgagaccgtgaagctgatcgccggcggggtctcgatgatcttggagggcgtgggatcgacccaggtgaagtcgcgggcaccggcatccaccagcatgtgggtgatgcgccggaagcgatcgggggccggcatctcctccaactgctcgatgagctggcccaactccatgcactgcggcgtgggaatgggcagcttggccggcgccgagccgaggatgtgcctcgtgatggtgtacggcgtgccgtccgaagtctcctcggtgatgacctccggcgtgtccgcgcgcagtccgtcgaagcgacgacgggcatagggttggacatgcaccttggcgccttcggcaggaaccgtggtcaccaggctgggatcgagcaccgcgaactcggaaggcttgagcttgacgacgatggcatcgtcggtcgcggcgaccaccttgccgtcgaagggttgggggtcgatggcgaagcccagcgttgaggacagcggctgatcatcgaacacgcggtacttgaacgaccgcacgttgcggggcacatggcctgcgaccagcgaaggcatcatggatttgatgagggaacgatccatggggaaactccttgaggaaaaacaagggattccccgcccgcaagggagaggtcccttgtgggtggcgtggatggacgcggtaggtccgtaggaagaaacgaccagcacggtttcccgcgcttgcagcctcgaaggtctcgactgcctgggcatgtgccggcaacgccgacgaacatggggcaagcatggccctggggcggtctgcctgcccgcaggaaacggcaccgcaccacaaccgttttcctgtgctgcgggcaagaaaaagcccctcgaaaggggctggaggaatcaggcttggtacacgaagtagtgctcgcgctgacgcggaaagaacacgtgtttccacgtgtcgccgcttgtgttgccaccgtcgaagacgaccatttcgtagtcgtccacgtcggtgtccaccaggtcggcgctggcgatatggcgcatgtgcagcgtgccgctcatgcgctcgaataccaggatctggccgatggcatcttcctggctcatggcgttgacgcaggctccgagttggtgctcgaagtcggatgcgggtgtgatgaggtcggggaacatgggatcgctcctgtgaaagtgcgccggcccggctctctggcgggagaccgggccggcatgcggtgaggacaaggaaggccggggatgtgtgtggcagctattcgccggccagcgataggcccggcaacacgggtgcgtcggcatcgaggatgaggatgcgcacgtcggcctggccggccagttcaaggatctgtgccagctcgtccggcatgcccttgctgcggtgctcctgccgaagctgctcggcggcgatcccctcgacgtcctgcaggtgctggtccgtccagggcgtggagatcagcttgacgccgatcgccgggctgtagggaatccggaacgcgatgaacaaaaaggcctccggcgtcgcgaggtcagccaggttggccaggtactggccggtttcgcggctgatgtgcgcgctgctgatttcccagcaccggctgtagtagccggtctcgaagctcaaccgctgcacgacttcccgtgcggcctcggccgaataggtgtcgccaatgtggacggggcggccgtcgaagtcgtcgccgtggatcgcgtacaccacggcacccaccatgccttcgccgctgcccccttcagccgcgtcgcattcggcgatcagtgcggcgccgacaggttcggtgccagtccagaccaccgcgaagtcgctggtgatgatgcaaggagaagaaaccagcgccgcgtcgcagaggtgctgctggctcgggtggatgtttcgccaaacatgcgggcttccgtcctcgtagctgatggacagcgtgcggacgattttcagattccagtagccgcgtagaaagggattgggattctgggacatgggatttctccaacagaataatgatggagcaaatccccgccaccgggaattgaccccggtgggtggaaagaaaggaaacagcgtcaggtgacgctgatcgttggcgtttgggccaatcgctcggcgacgcgccggcgcaaattcatgcggaatggctcgtcgctgacgcccgccagcagattgatggtctccagcgcgatcagggccgaagcctcttcgatgtcggcggccacaatggtcttgcgcaattggtcgccgagctggagggcctgggaggaggagctgatgaagcggacctcgcggctcaggtagcagccgttgccgccgaactcgaacagccgcggcttgctgcagtaccagcagccctcgaactggatggcggtcaggtggtgcccgtcatcgaaccgggtggcgatcagaaacaatgcgtcgagatcggcggtgtcctcgaacgaatgacggtcgatcaagttccccagctcttcgtcctcatcggcacggaagtgcacggcgagcagttcgagcagcggcgggatcgacagcccttcgtcgtccggcatcggaataccgagttgcgtggccaggtcttccaggccatcgagcacgtccggccattgcggattggtggtctcggcgatctgggcgatgtaggcctgcccgttgccggggtggctctcgtccagcgcgaaggcgccgaacagcgcctggatgacgggcgtcacacggtcgagcacgagaacgccggtggcttcgtagtagttgttggccatgaaggctcctttcgatgaatgaacggagccagcccttgcggacgatggcatccgcaggggaaaccgcctgatgccggatggcgctgggcggggagaaaacgcgagggacatggcctcgaacgaggcgcatgtccctcatggggtcccgtgaacgcagtgatgaaggtgtgccagggaccggctcaccaaccgctgtagttcagcagcaggtcggcgatcacctggcgacgttgcagatcgagaccatcgaagtccgacagtccttggaagtggcagcgcttgagcatggcaccgccctcgcgcgcgttgtagaagctgaacatggcggacaggaacatgcgttccccgctgctcaggacgccgagtgcgtcgttggcacgcagcatgtcgggacgcagatcccacttgctctttgcctggttcaggccttcgcgcgtgccgtcgccaaaccattgcgggcctgcgatctcgacgccgcgcttccagacctcgaagaaggcttggggcgcggcggcgaaatgctgctcttcccgcatgatctgatcgacgacttcctggggcaaaagctggttcatgacgtggttcctccagttggatcagggtgtggcgagctgggaccagccgcctctttcgagggcacgttgagccgcggcatagctgcggaagtactggcaggattcccgcgaaacgggaccttctgtatcgcgcgtgccgatgtagtggccggcggcgctatgcaggatttcgagcggcaggaacttgccgcaatggatcaaggccaactggccgaaagaggcttgctgggacatggacgggctccttggaaaaagcggggcctcgtccctcacgggatggcagctcccgcacgcggttgagaaaaaagcatcggcgtcacgggtgacgcgcgtccgcagactcgatgcgatggcggactggcgggtagcgcggaaagaatccgcggcagcctggaaactctggctgctggcatggtgctgacgaatcagcgacacatgcgggcagcttcatgcgcgaggcgagccgcgtcagccggaaatcggcatttgcaacagccccgattggcgaacgcggaaaaaagaaagccccgcaataagtgcggggctgtcaggaggatgaggcgaaactgggtcagcgaggcctgtcgcccagtacatgctgcttccacagggcgaatgcctcgtccggtcccagctctgcgaggatgacgatgggctggccccgacgggcacgcagcgatgcgaaatacgctggccggtcggcgatggcgttgagcttgatgccctttaggaacagcaactggcgggggcgaactttggtggtaacgcaggcatgattgcgcttgtttggggcaaaagggccagcgaagcgggcggacacggccagaaaaccgcgacgaactacttgtacttgccaggcgaggcgaacgggtgacatcagcatatcgctatgcggtaaagaagaccgtcctaaagcttgcaggatcccggcatagcttcatcatcacctctccgtgacggctcattggaacgaaaaaggccagcatcgccgtgatggactttcataattgccaggtcaactggcttgcgtgctgtttattcacagcaaggcattgcgacgtcgttgcagcaatcgccgccatcgcaacagggcgttgcagcaaaagcggcggtgggcgctagcatgagggccaagccgcggccgctcatgctgggggccgttctcttcagattggtgtcctgcaccgtgtgcattgcgaatttccggatcgtcccaatgtcactgggactcctttgtggcggccgggttctccacgctcatgaacgactgggccaccagcgcgatcgccccgcccacgatggccatgtcagcgatgttgaaggcgggccagtgccagccgtgcaggtgaaagtcgatgtagtcgataacgtgcccgcgcgtggcgcggtcgaacgcgttgcccaatgcgccgcccagaatgaggctgtacgaaaggccttccgttttgcgcagcggccgggagagcagccatgcgagccatgccgatattgcgaacgcgatcgccagaaaaaaccaccgctgccagccgcccgcgccagcaaggaagctgaacgccgcgccgggattgagagcgtgaactaggttgaagaatgacgccacctcgtgcgaccaacccaagggagttgtcgcgtcaatgtagctcttagctgcctgatcgccggcgaatataacgatcgcgagtgagtaccactgcgtcttgcgaagagatggttcatccattgttcatgccgccttgaacttcaggaggcgcagcccattgacgacaaccaaaagacttgcccccatgtcagcgaacacagccatccacatggtggcatgccctgtgaacgtcaacgcaaggaacaccgccttgatgccaagggccagaacgatgttctgcgtgaggatcgccgcagtgctacgcgacagccggatgaaggcggggatcttgcgcaggtcgtcgtccatcagggcgacgtcggctgtttcgatcgcggtgtcggtgccggccgcgcccatggcgaagccgatgtcggcacgggcgagcgcgggcgaatcgttgatgccgtcgcccaccatgcccacctggccctcgccgccgaccaggctttcgatggtcttgagcttgtcttcgggcagttggtcaccacgggcttcagagattccgacctgggcagcgatggccgcggccgtgtgctggttgtcccccgtcagcatcagcgtgcgcacacccagcgcctgcaggtcggccaccgcctcacggctggtttccttcacggtgtcggccactgcaaaaatgccgagcacggtcgcatcgtccatcagcaggatcgctgtcttgccttggcgctccagggtctccagccgagcctggagcgtcgcttcgctcaggcccagctcctgggcgagcctgtggttgcccatgtgcaacatgcgcccggcgacgcggccgcgcacgccgcggccaggcagcgccgcgaagtcgtcgacctcgtgcagcgcgatgccgtcacggttcgccttgcgggcgatggcctgagacacaggatggtccgagcgtgccgcgaggcttgcggcccaggcggcaacttcctgcgcctcgccgatcagcggcacgaagtcggtctgctcgggcttgccatgtgtgagtgtgccggtcttgtccagggccaacgccttgagcttgcgcccgccctccaggtagacgccacccttgatcaggatgccgcgtcgggcggcagcggccaagccgctgacgatggtgaccggcgtggagatgaccagagcgcaggggcaggcgatcaccagcagtaccagggccttgtagacccagtcaaaccatgcgccgccgaaggcgagcggcggcacgacggcaaccagcacggacaccgcgaacaccgccggcgtgtagacgcgggcgaactggtcgacgaagcgctgcgtgggcgcacggctgccctgcgcggactccacggcatggatgatgcgcgcgagcgtcgagtcgctggcgcctgcggtcaccttgtattcgaaagagccggtctcattgatggttccggcgaagacctggtcaccttcggccttctcgacgggcaggctctcgccggtgatgggcgcctggttgatggccgatcgacccgaggtgatcaggccgtccagtgcgatgcgctcgccaggacgcacgcggaccaccgcgccctttgcgacctccttggccggcagctctgtccatgagccatcggcctgccgcacggtcgcggtctcgggcgccaagtccatcagcccccgaatggcgttgcgggcgcggtccagcgacttcgcctcgatcacttccgccaacgcgaacaggaacatgaccatggcggcctccggccagtggccgatcgccatgccgccggtgaccgcgatggccatcagggcgttcatgttcaggttgaggttcttcagcgcgatccagcccttcttgtaggtgctgaggccgccggtgaagatcgaaaccagtgccagcacgatcacggcccaatgattgccgtcgttgacccagtacacgccttcggcggccaccgccgcaacgcccgaaaccgccatcggccaccaattggtcttgtgcgcggccaccggggcatcgcgcggctcatcagtcctctggacctcggcttccatgcccagcgattcgatggcttcgactgccggcttgatcgcgtcgggtgtgtgccgaaccgtgagcgtgcgctgcatcaggttgaaatccattccctgcacgcccggcatgccttgcagcttgccgcggatcagactttcctcggtcggacagtccatcttcgcgatgcgaagtaccgtggtggctgtctgcatgtcctgccgcgcagcctgcattccaatggaagcaagcgccttctcgatcggcgctgaggtcgccagcgtgtgctggactcccagcacacgctgcatcagattgaagtcgagcgcggtcacacccggcagcttgcccagccggtcgcggatcagcgcttcttccgtcgggcaatccatgttctcgatccggtacgtcacccgctcgccgatcggcggcgcggaaacggcagcggttggttgctgctgcagggccgaggatgggatcacagccgcggcttcgatcggccccgtgtggccgaaggtctgctccttggcgcgcatgccgatcgaggccaggacctgctccatctgcgcgcgtgcctgagcgaggtgtttcaccgacagggtgcgctcagcgaggtcgaagtcgaggtcctgaattccctcgactgccccgaggtgcgagcggatgagtttctcctcgctcgggcagtccatgttctcgatgcggtaggtggtcgacacggcggcgtctcggacagcctgagccttcatgcccaccgaattcagcgcttgctccaaggcatcggccgagacttcgcggtgcgaaatggtcaacaaacgctgcggaagatcgaacaggagccgctcgacaccgggcatgccctccagcgttcgccgcaccagtgcttcctcattgcggcaatccatgttgctcacgtggaaaacggtggtttcagtgctggcctgctcactggcgcacgccgtctgttggccattgccgccggagcaggcgcatgggctggaaggttctttgttcatagatcgctcttcattgacaaggttttccccggatgccatcattagaaaacctctagtagatatagagtcaagttttttataggaagcaaccatgatgcggatcggtgaactgggcaagaaggcagattgcttggtgcagaccgtgcgcttttacgagtcagaaggcttgctgcccgagcctgcacgtagcgagggcaacttcaggctctatgacgaagtccatttgcagcgcttgctgttcatccgccgctgccgggcgaaggacatgacgctggatgagatccgtcaactgctgaacttacgggatcggccagagttgggctgcggcgaggtgaacgcgctggtcgacgctcatatcgcgcaagtgcggaccaagatgaaggaattgcgcgccttggagcgcgagttaatggatctgcgacgctcctgcgatagcgcccgaacctcgcgcgagtgcggcattctcaacagcttggccgagcccgcctgaagctcgagcgtgtcatcggtgctggaagtgatcgggtccagttctgagagccacgtgccgcgctccatcatgcgaaagcgcgcgattctgacgttttgagacggcgtgcgaccgagggcgtggcccacaggagccagcgcgagccggacgacctgcgcgccgcaatctccgccaccttacgggttctccaggccagaccgagcatcgcggcgtggctgcgcaggtgcaggtgcaggccaaggtagcagtgcgccacgacgcggcccgactcatgggcacgccacgcaactcgcgatcgcttcgcaagaagccgcaaggcccgactcgcgcaagaatgcgacgtgggcaagatcgtatagccagcagcgcaagcgtttgccgctgctggccggctccggaagggatagacaagctgcgggccgtagtccattggaaagtccatctttcttgagtgtcactctttggcgcccagcgtgtgcttttgcgaccggaaagcgctgaacaagtggcccccgggcatccagaaatcgccgtagttgacttgggcgtcttcgtgctcacgcttgtgatgccagcgatgggcttcagccaccccgatcaacaatcccaacggcccgacccggtatcccagattggagtgctggaaggccagatgcacgaccaagaagccgagccatgcgccgacggccaaccacagcttggaacgccgctactggctcaacggggagtggaaaggccgcccgccctctagcaaggcggcacaagcgagcgcgacgatcactgtgagtagctccgtcggaaaagacggccggccggtcgcgagctcgccgaagagcacaaccgcagtggcgccacggatcagtggatagcagccataccggatgacagtcgcaatgaagggggcgcattggtgctcatctgttctgtcctaaagctctgactggattggaaaaccttctagctacggtagagtcaagggcgtccgggaagaccctgtggcaagttcgttgcatctgcgccttgactctccagccgctacaggcttcagcatccatcgatttggaaggaacaatgcatggctgaaaaccacagaaatcacgaaaacgacgagttgggccgcctagatgcgagcgatgcgaaggaccgaaagattcttctgactgtgttgctgatcaacctgacgcagtccgccgccggcattgcccttggcatctgggctggctctacggcgctgatgggcgccgggttggacaacctcgccgatgcgtcggtctatgcggttagcctgtatgccgtcggtcgtgcggcaacggtcaaggtgggcgcggcccgcttgtcgggtttcttgctaatcggcctggccgcgctgctgctgttggaagtcctacgccgcttcgctggaggggaagagcctgtcggcccagccatgatggccatggccgcgctgaacgcggctttgaacctagtgtgcctcagactactgcgccgccatcgcggggaagatgtgaacttcaaggcgtcagcgatctttaccagcaacgactccatcgtcaatggtgcgattgtgctgtccggggtgctggtgatggggttcgggtcgaacatcccggatctggtgctgggcgtcatcgtggccgcaatcgcagcgaatggggggcgggaaatcctgcgcgaagcatcggaaacagctcgccgtaaggcgggcacataaggcatgttttcgcccagttcatcccgaggtttacctctgcaaaagaggtagtccagcctttgggctacggcctcggctgcagccgagcgtaccattggcgatggccgcgcgataggcgggcatgccgttctcgacctccgtctgccgtacagcagcggtgcgcaaggttgagggtgcatgtcgtctctcctgttcgtgtggcccaggccaatggccgggccgggacgttgatgggcaggagaatggcgccgaaggcccaacggccttcggctcgggagaaaagaggaaccacccgtgggctgattggcaggcccggtcgtcgctagaaccgtctgctcatcaagcaatcacacccggcccatgtcgtggctggggccggcatcgtctggcgcacatccgcgcacaaagggagcccgtttttgcaccggcgggcaccggcaccgattaccgctgaccacgaagggtctcccggtggctcgtgcagcctggcaagccaccgggagacccttcgcagagggcggaagaaacgcagatcaacagaacgcgcgtggtgcggctcgcagagaagctaccttcaggtcccgcggccggggacggctgggcgggacgcgcacacggatcaagaaggcgttgcgcgctgggcgtcccgcagggcatgcggcggagtgcgggacaggggccacgccgccgaaggcgggcacggctcacggggaacgggggcggtcaggagcctttgcggccgctacggcgcgggcgcgaggcgccgcgcttggagctgccggattcgactggcagcgtgcctttgcagtccgggtagcggctgcacgaccagaacgggccgctcttgccgctgcgctggcgcgtgggtgcgccgcactgcgggcatgccggcccttggggaaccttgatggacagggaggcgctgccgtactgcgcaatcaactgcgaaatccacgcggcctgcttgccgatgaacacgtccagggtgagctgtccggcctcgatcatgtcgagcgcctgttcccagacggcggtggtgccagggtcggcaatcgccgcaggcacggcatcgatcaaagtgaaagccgcatccgaggcgcggatggcgcgccccttcttcacgaggtagccgcgagcgatcaggccgccgatgatgttggcccgcgtcgcttcggtgccgatgccaaccgtatccttgagcttctgcttcaggcggggatcggacaccagcttggcgacgcctttcatggacttgaccaactcgccttgcgtgtacggtttgggcggcagcgtcttgagtgccttgagatcgacgtcggccacctggcatgccaggccctcatacagtttcggcagcgcgggcagcacctgggcgcggaccgcagtatcgccctcgccatcaccgtcttcggcctgcggctcggcgagcacctggcgccaacccgggatgacaacctgcttgcccgtggccgccaggttctgccccccgcacgaaaacttggccacagtgcggtcgaactcgtggtgagggaggaactgcgccaggtaatgcgaccggatgagcctgtacacggccagttccttctcgctcatggcggagagcttcgccggttcgagcgtcgggatgatgccgtggtgcgccgtgaccttgccatcgttccaggcgcgcgagcgctgcgagcggtcgagctggcccatgatcgagcgcagcgagggatcggtcttgagcaggctgtcgagaacggtgggcacttcggcaaacatgctctcgggcaggtagccggagtccgagcgggggtacgtcgtggccttgtgcgtctcgtacagggcttgggcaatctccaaggtttcctgcacgtccagcccaagctgcttggaacacacttcctgcaaggtgcccaggtcgaacggcagcggcgggccttcgcggacacgctcagtctccaccgacacgacgtgggcactgcccgcagcgcggatctgctgcatggtctgctgtgcgaccggctgccgcaggcagcggcctgcgtcgtcggtgcacgcatcgggtggaacccattgcgcggcgaaagtcgaaccgcctgcgaacagggacacggcgatggcccagtatggtacggacacgaagcgcgcgatctcgcggtcgcggtccacaacgagcttgagcgtcggggtctgtacgcggccgaccgacagcacgccgtcgtaacccgcctgtcgccccagcaccgtgaacagccggctcaggttcatgcccacgagccaatccgcacgggagcgcgccagcgccgagtggtacatcgaaagcgtctcggccgaaggccgcagcttgcccagtgccgcccgaatggacgcatcgttgagcgccgacagccacaggcgttcgatggggccgcggtagccgcaaagctccacgatctcgcgggcgatcaattcgccctcgcggtcggcatcggtggcgataaccaggtgagtcgccttcgccaagagcgccttgacgaccttgaattgcgtggcggtcttcggtttgacctcgacccgccagtgctggggaatgatgggcaactgctcaacggaccatcgtttgagctgctcgtcgtaggcctcgggcggcgccgcctccacgagatggccgatgcaccaggtgaccgtgacgccggaaccgttgaggcagccttcaccgcgctgcgtggcgccgagaatccggccaatgtctttgccctgggagggcttctcgcacaagaacagccgcatatccgtccatcccgattcctgttgttcatggagttgctgggatcgaggatgccgagcgcagcccctggcagcagcaaacaagccgcatgcggcagcgaccgctttcacgccgatgaaatggcgagtgcggggaaggtgcgtggccggaagtgtgcgggccgagagccgcgatttccgggagcgcgcgtggaactcggtggacgttggtggagctatcccctggggataattcgcagcgcatggagggcggcgaagcactgcggcagccgccctccatgcccgatcacttcctgcgcttggtctctttcggcgccgtcgattcctgggtggcctggggcttcggctctgcctcctgtggcttcgggctgagggccacagactcgatgcggtacggcaggatgccgacactgcgcgcgttgacctgccaagtctcacgcggctgatcttcgttgtccgtccaggggtcgcgctccatgcggccgacgaccagcacccgcatgcccttctggtagagctgctgccagcggtcggcgtcgtggtgccagagttccaccggcgcccagaagccgccgcggtcctcgaactcgccgcccttggtggggacggggttgtcgaagtacacgttcagccggagcaaccggcgaggatcgtcgttgccattggggaattcgcggtactcgggaggcgatccgatgttgccctcgccgatgaattgtgtgctcatgttggaatctccgtggtggttgaaatacccgtgcctcgttgggctcgggcgcgtgctcggatggcaggcgcaatcaccgatcgcgcactgcggcaggaacggacgcgagccggcgcaggtaggtgttgtccgcctgcgcggccttgctggcgcattcctgtgcttgcctgcccagggtgtgcagcaggctgatctgcatgttcagcatgacgcgctgcagttcgatctcgtgcaggtcgtgcagcaggttgaccggcgtgctggggctcgccatcagctcctgccacaacgccacgcccatggccgatcgatcgtgcttgcgccagcgaagaaaggtcgtgcctgcgccagtggtctgctgggccagctcgacgggaagcagggggaagggatgcccgcacgcctgtggcagcacctgtcgctgcgccagggcaatcaactcgtcgcgcatggcgaagcactggctggcccaggcctcgaagtcccctttacctttaaaaggctttaaaaggccttttagagaggccgcgtgttccagccgcatgaaggctggctgttccagacgacggaagtagcgcggttcgcggttcgggtcgctcatgccggttcgtcctcgccggcggctgtggacttggcctcggccgaatcggcggcagcgccttcgtcggtgggagatgcggctgcggcagcgctatcaccacgctgttgcagaccacggcgcacgacgggcggcgcaaacttcgagcggcgcatgccttcgagcacgtcctgcggcagttcgccgaacttctccaatgctgcccgagctgcggcgttcttggccgcgaagtcgtcgcgggtgcagcccgagtagcggtattgctgggccaggctgaacaggctgcgcagcgcgtgggcaccttcgttgagccagcgctccaacgtcgagcgatcgatcagcgcggtgtggtgggcgaggatcagcttgcgggcgatgtcgtcgtagtcggccagcagatagacggcggcaaagccgagctgcgcgttcacgaacaaggggagcttcaccggctgcacgttgaggttctcacccaggctcaacgccgcaggcacgccggccagtgcctggtcaacctgctcgcgcagcgattgcaacgtggtcctggtctggtcgagcttttcctcgatgcgcaacatccaccagtcgctgtacgggtcgtcctgctccgagccgcgcttcatcttgttcatcacggcgatgtagccgttcaggccgacgatgccgggtcgcccctcggcggcggcgcggccatgccagatgcgcgaggcgtggtgggtgtgcagcgtcagcgacatcgcgctgcgcagggagccgaggttgagttgcaatggttcgttgctggttgccatggtgatcgctcgctggtggacagggagccgccagcatccgcatgcagcggaaggcagtcagtcaacaaaccgaaatgagccgacccccggttctgtgcgcgctggcggcgcagcgcgcaacggtcccctggggaccgctccgcagatgggcactcacatcggcgttcccgtcctcggttgttgacggtatgcgtgctgcaccgcacgtcgcgctgccgttcgacacgatccttcgccgcgcagccgtccccaggggaccgttccgttgagcgccatggaggtctgcttcatggtcttgcatgcgctctactcaggttttgcgcagcatgtcgcgccgtcgcccggcgcttcaccgcacagccgtccccaggggaccgtttctgccgaccgccatggagatctacttcacggctttgacaagccctgtgctcaggatttgcgcagcagatcgcgcaggcgctcgatgtgctgccgggccacctcgggcggcacgacgttgcgcggcggctcggttggtggcgctcgcgccgccgatggtgttggcggtgccgggccggtctgcttggcccaggcattgaactcgccgcgcatggcgcgctggatgatgccgaacagataaccggcggggttgcggatgccatgcttgccgcaccgtgcggcccattcgtccagcacggcctgccgcagggcagcgtccacctgctgcaacgccatcttggctccggcctgctgttccgccttcagttccgcgaagcgcttgggccattgcaggtcgcccagcgcacgcgcctgcgcggtagtacgtacttcatcaatacgactactacgtactgtacggtcctgcttcgaattccgaagagcgccgtctggcgcgggtttcggccctgcttcggattccgaagatgggcgatcgccattccgaagaaggctcgcgggcccttcttcggaatcgtggaccgcatcctcctgtggataactttcggaggcggtgatgccctggtcggccaggcgctcggcgagcacttgcagccgcgacggcaaggtgcgtccggacagcatcgggtcgtccgcgatctcctggagggtgttgagtcccaccacctggacggccttggccgaatgccccagcgactggctgaccagggccaggtagtcggcgtcgagttgcatcgcctcgaacggcgtcagcggttcgtcgtgcaggacgtagaggttgccgaggatgcgaccggtcttggggtcgcgccgtcgtcgcacgaggctcagccagcgcgtcaggcgcagcagcgtcagcgcccgcgccacggtctcatgggaggcctggcctgcgcagggcatcgacgccagccaggggcgcaactgctcataggtgggaaatgccgtgacgccatcgtcgttgagcatcaatcggaacacctgccaggcgttgcgctccagcggtgtcaggcggcggtcgaggaacagccgccgcggcacgctctcgtgccgattgccactgaacaggaaggcgtcgccggacgtaggaggcgtgggcgttggagcaggcagggacgcgggagcgccagagctggacttgggcgcgaggtccttcagcgcagcgtcgaacaggtcggcgagtgcgatggggccagggcgctgggctcgtggggcggtgtcgtccacggccatggcctagcccaatccctgatcgacccagttcctgatcgcggcccagaccaccgagagcggcagcgacatgccctcggccaggtccatggccgcatcgagaatcgaggtctcgtcctccagatcgacgttcctgctgctggtcacggctttccattgccgccacagttcggtgtcctgggtctcgtccaggacggggtggcgccccttgcgcttgggcaggccgaggatctcccgccgcagggcgacttcctgatgggtcaggccatagaagcggctgaccatctccgtgctggcccccagccgcagcatgcgatcgaccgtggcgatttccttctccacgtcctgtgcctggttgagcaggcgctgcagcacttcgcggttgaccgtgaccgagcaccacgagacgctggcgttggccagcacgctgatcagcgcggggtgcttgagcgcatccagctcggcctcgccgaagcccatggccttgcagcggcgcagttggccgttgcgaaggtcatacagcgcctgggcaatcacggcctggttgagcggatgcgatgtggacatgcggcctccctcgctcacgtcccgggcgccgtggtgccggcttccaggtccagcagacgccgggcgaggcgcagcagccgaaagagcttgaccaacgccgtgtcgctcaagcgccttgcgccgctgccatggccttggctctggccgtgcaacagggtcggcaggtcggcggcgagctgcgcgccgtccaggcccgcttcggcgacgggctgacccgtcagggaagtgagcagcgtcagcaccgcgcggccgagcggcgacggggcttggccgcgggcgcggcacgcaaacccgatgccatcggcgcgatcctcgatgcactcgtccaggcctgcctccccggcgatctcgcgcgcgaactgcgcgatgtggatgcgcagccgatcgggcgtgtccaggccggcgtcgatgtaccagacgtcggagatcggatagagtccgccggcttgcaccgggatggactgcagcacgctcgccgagaagtcgggcggcagcgcatcgcccaactggtcggcgaccatgcgctggatcgattggagccgttctgtcgtcggtgctggcgagacgatgtgctcgcgaagcagatcgcccggtgcggccggctggcttcccgtggccgcttcgccaaccgccgtgtcgtcgtggcgcaaggtgggctcggacgccggagggctggcgggtggaggaccggccgccgctgcaggcgtggcgatggacgatgctgcgcccggcggagtcggcgtgccggcggtgggcgaaggcaacgccggctgcgccgcaggtggcgtcgggtcactgaccagcgcccggtggcggctttccgattcggtcaggtccagcgccagcacgtcgtagccgatgcccagcagctcggacatctggccgatcagctcgtcttgcacgcgctgcggcgcgaactcgtcgccctgcgtgtcgaactgcgccagcacctcctgaaagaaactgtcgaagtccagcggcagcgaacggtccttggcgtagtgctcccaggtgcgtttgcaggccgtgcgcatgaccgacagccgctcgacctggtggcgccccaggccgccatagagcacagtgggaatggcgggcagcaggtagcgcaccgcgtcggccatgcgggtgatgtgcgaccgctggacggggaagccatcggccgccaggcggcgggccagttccgactggctcagggcggcgccgctctcctgctcgtagaactcccgtgctttctcgacgccgagcgcgcgctcgatgaacgtgaggccgccgcgcagttcgttctcggcaagatgcccggtcagcgcgacgatttcaccgcgctccggccatggtcggaacaggcacgatatgcggaagaagcgttcttccttggtctccgaccagagttcgcgcaggatcgccagtcgcgtgttgccgccgttgcggatgatgtagtggtcctcgccgggcctgcgcgtgatggccggcgccgcgtccaggccgcgctcgcggatggatgccttgatttcctcgtaagccgggttgcgcttcatgcgcgggtcatggtcgtagggccgcaactggtccagcgtcacgaccatgggcgtgtccgcgatcgggtcgctcaaggccgtagccgctgggccgctgcgctcgaagccggccgcgagcagcttgcctgccatgtcctgcgaggtcatgtcagccatggccgcacccctcgcagtccccacgaccgccggccggcgccatgcgggcctctcgctcggcgcggcggatctgcgcacgggcgttcaattcggcccggtggtcactcgctgtcgaactcgtgtagatcgccgcgcagccggccttggtgaacttgaggtgcccgcccggcgtgcgcttgacgtgccagccctcaccgaccgcgaactcgatcagggcgcgcagccgcttgtggccgcgggccagctcatgtgcgttcgccatggggcctcccaggatcaagaggtcgctgcgggcggccggatacttgagccagtcggtcctgccattgcgggaacaactcgctggcgagcgcgcgcatcgtgtcgagcgcggcaggggcgactctgccgggcggctggcggtgctcgacccgatgcaccggcaggccgcgcgttgcggcacgtggatacgcttctatggccggcacgtcggtggcgagcacgcggatgccggcgctgtcctggaacaggtcgcgcaaggcctgctggatcagccgtgcgttggcggacaccgggtggacgcggttgatgagcaagtgcagcggcggcggttcgatgcccaggtgccggtacggcgcaatgtcttcgagcaactgcatggtgccgcgccgcagctcgcgtgccgcgaggatctccggcgtgacgggcgacagcgcgagatcggaggcgagcaccgccatctccagcagcacggaacgcgcgccctgggtgtcgatcagcaccaggtcgtagaggggagcaagtgctggcagcagatgccgcaaccgcaggcggccatccggcgcatgcagcaacaacgtgttcagctcgccccggtggtcgtcggacagcaccaggtccaggcccgcgatgatcgtgcgggacacgagctggccaaggtcgcgctcgttgaaggccaacagctcatagatgccgcccggcgcgcgctgggtcagttcgtagtaggaggacaaggtgggctgcacgtcgagatcgagcagcagcacgcgcaggcccgcgtccgcggcgagcccgcccaggttggcggccgtcgtggtcttgccgacgccgcccttcgttgaaatgatggacacgacctgcatggcgctctccggctgggaatgggaagtccgcgggagagcgggtcaggtccggtggttgaggcgctcggcgatccactggtcgatttcgatcgaatcccagccgacagcgcgcacgcccaggcgcagcgcctgagggaactggcgcttcttcatcaggttgtagatgtgggcgcgtttgaagccggacttcgcttcgacttcatcgagccgcaggatgcggcgctcgttcggcgggagtacaggggtctgcgacatggcggtcactcctgaacgctcggtggcgtttgttggcgtgacctctattcaatagacctggctgcggaaagacattgcaaatgcaatctccgcgattgcacatacaagctggataacctcatgcgcttgcgctacgaacgtacctcttagcgttggcgaactttccgtttaaggtgcgctcagtgatgcccatggtgccgccgtagtgggcgaccaatgcagagacaagggcctcctgcgttttgaagctggaatagggcacgcctgaaggcgactggctcagcatcagcgtcaacatccctccaatgatgttgagataggtcgtttccgcccgttcgctgatctcgcattgcttggatgccaacagcaccgaggattgcttgagtagcgtgtcgtgctgctcctgcagttctcgcatctcacgtcgggcttgttcaagcgcggcctgaagggccagccgctccacgaggatcgcctgtcctgtttccatggtgatgaaaggatgcgccatgcgttcgccacggctgaacagaaatcctggccggtgctcgggatagtgggtgcgcatccagcgttttagatcgacatggcgaacagtcagatccagagaattgagcaggttcggatcattgagcgtgatcccgttcttgccgtagggcagctctccgttgaggatgccgtcatagatacgttccgagtgcagccggcactcattccatcgagggcagttcagcgaccgaggcaggacacgcggtgacgcgatcgtggccaggatcatcgggagataccgcagcaacccagcccatcggatggccgcctcgatgggacgatagaacacctttgatgttgaaatgtccttgtgcatgtcttcgtctcctttcgggtgcgctacatcaccggctcctttcttgcccaagggctgttgtgtcgttatggcctgcgacggacgcttgaggcgatgccctaagcgaaggcggaggaggccattggcgtccgccgcaggtggccttgtcttgcttgatatgcaagaatcgatcagttgccggcccatcgagcgatgaggacgcaagctcgatattggcgctcacggtaccagcgtcataggtggcgcaaagcccatcaagaccgatttggtatggtctgatatccagacggttcaagaccagcgagttgaagcgttcgacgcccctacgtccagttggggactggaaatcagcggttagtgatgcatcgctccacatgctgatatatcgacaaagtatctgccgcagtaccagtgaccctgccaggttgccccagcacataggagacggagatggctgaacattcccatgaacatcaacatcacacatccggtcagatgggtaagcacggccgaccatacgccaagttctgggtgaacatggtgttgggcctcgtcgtcatgtacttcgtaatgttcagcatgatcgacggcgccagggacttcagaaacaatctcaacatgctctacatggcggtcactatgtgggcgccaatgggcatcttcatgctagcgacaatgcccggcatgtttccaaaccggcggctcaatctcgtgctgtacggcttgtttgccgttctcacactcggttcttttgccgctacccgtgctcaaaccggaatcggcgatcgacagttcatcgcgtctatggtcccgcaccattcgggagcgatcctcatgtgccgcgaggcgcagctctcagatccggaactcgtcaacctatgccaagcgatttccgatggccagcgcgcggagatcgagcagatgaaccggattgctgcacgccttcgttgaggctggctgccactacactggcgccgcgttgcgctccggcgaagttagccgcagcgatgtaaagatgagtacttgcggtgttccgatgccggcggttgtgtcctacagccgtccaggtgccaggtagtccacgcgacaccaccccgcgctgcctgcggagcgagcgcaagtcatgatcgtcgcaagttggagttcgatagcgaacccgctcagcagctggacgcatcaggcgtaacgacgggtggatggatcatccttggacgctggtggaagtggttggatgaactttgttgccgagggcgaaaaacaaggctataattgagttcttcgctgatcaccacagtggagaaagtgattgggaaacagagacttagcgctctagtgcatgactcgtttcccgctccagattcaagaagaacgctcccggaagggagcgttttttcgtttgtgtgcagggcacttcatccctgcttcaccgccaccccatcgcctcaccacgcgtgctcgcgaagctgtatctccgttccagcccggcgatgccgcgatgcctcatcaatcctctgcttacgaccacgatgtggtcatcgtcggcgccagtttcgccggtgccgcctgcgccttggccgccgcgcagtacggtctgcgcgtctgcgtgctggaacgcaaggtcgaccccggcgagcgcctgcacaccaccggtatcgtggtgaaagaagcgatggaggagacctggttggggcgcatgcccgaacatctggtggaccgggtcgcaaacgtgcgcctgtatgcgccgaaccttcgcagcgtgttgctggccgcaccgggctattacttcctcaccaccgatacgccgaacctgatgcgctggctggccagcgagctgcatgcgaacggcgtcgacctgcgcctgcagcagtcctttaccgacgcccatcgcagtggtgacggctggcaggtggatggggcagggcgatgcgcctatctggttggcgctgacggcgcacgctcacgcgtggcacaacgcaccgggcttggccaggtgcgtgacagcctctacggcgtcgagcgtgagttcgccggcctgcaggtgtcgcagggcgatgcactgcattgcttcgtcagcaagcgctacgcaccgggctacatcggctgggtcgcgcagaatccgaccgggctgcaggtgggattggcgctgcgtcatgacccgcaacaggtacggccgccggatatcgatggcttcctcgaccacgtgcgcaatgtggtcggcattccgccttcggcgcgtccctcggccacccgcgccggtctggtcccgtgcggccggccggatgggcccttcaccggccaacgcgtgatcctgaccggcgacgcggcaggcatcgtctcgccgctgtccgccggcggcatccactcctcgtggcggcacggctgggcggtcggcgaggcgatttcccgccatctgcgtgggcaagggccggaagcggaacgggtggcgcggcaggtggcgccggcattccatggcaagcgcctgctgcgctgggcgatggaccatctgcaggccgactggccgctcaacgcactgctgcacacgggggccacgcggcgcatcgccgagcaggtctacttccaccgccgtggcctgcgaacctgaggtgtcggtcctgagagcgtgttcaaagtcttttgagcaagagcaccaagaatgccaagtggacgaactgcaggctggtgttgagccatcgctcgcagttcttccacagcctcctgttcttgtccagccaggcaaagctgcgttccacgacccagcgcttgggcatcactttgaaagtgtgaagctcgcttctcttggcgatctgcaccgtcacatgccctcccagaatctgctgcacgccttgcgcgaacggccgaccgatgtagcctgcatcgcacagcaggctttgtagccggctcaaccggggcttgcagcgctgtagcgcctgcagtgcgcctttgcggtccgtcacctcggccgtggtcaccgctatcgcatgcggcaatccctgggtgtccaccgcgatgtggcgcttgatgcccgagaccttcttgcctgcgtcatagcccttcaagcccgccgtgtccgtgttcttcacgctctgcgcgtccacgatcaagagcgtgctgcaggcgttgcgccccagtttctcgcgggccgcgccaacctgatttttttaatgcctgctccagcaggctgccaccctcgcgtggctcgctccagatggcaaagtacgagtgcacggtgcgccatttgggaaagtcgctgggcagtgcccgccactgacagcccgtgcgcagcaggtacagcacggcgcagaacacctcgtacagctccactttgcgtggggcagtctttctgcgcgcactctccagcaatggccggatcacctcgaactgctcgcgcttgatgtcgctggggtagccttttctcacccagcgagcttctcacatcaagagggcgagactttgaacacgttctgagggcctgaacgcctcccgcaatgccggtgaaaattcctgttgacgccgtgcagcaatatcgacacaatagcgctccttcgacgcagatcgaacggaatctgcgggaatagctcagttggtagagcgcaaccttgccaaggttgaggtcgcgagttcgagtctcgtttcccgctccagattcaagaaaaacgctcccgcaagggggcgtttttcgtttgtcatgacgttggccaggcgggtcgctacaggcgggccacgacattttcatggtgggcgtggtaagtctgcagctgggggcgattccgacattggtgtcgcaatcggcatgacgggggggcgcagcgatcgtggggacgatcggaagcacctggcacgaggggctgcaacagacgcaatgacctggaatccgcaccagtgttccgcctgctgcaggcactgaaaggctggcgaaaggcctgcgccggcgttgcctgaaccgcacgggtgctgtgacctttttcggaccatttctccatgttcgctccacaatcgcacggtagccttcatgctccttctacacgttggcgggctggtggtcaggcgtatcacttcagtggcagtgcccaggacggggcgcggactctccctgcaggcagtgctgcgacccggcgcgctgctcgcaagtctcgcattggcgggctgcatgtcggtgccggttccggatctgcctgatcgcacgcccagcacctggacccaggtgccgcagggccaaggcgtggcggtggacgccaaacagtggtggaaagtgttgtccgatccagcgctggatggactggtcgatcaggccatcgccggcaacctcgacctgcagcaggccacgctgcgcctgcaggccgtgcggattgtcgccggcacgtccgattcgcgcttcctgccggaaatcacggccagcgccaagcaggtgcaggatgccgctgcggtcgacacctacttccacgcgggtatcgaagcgatctgggacctgggcctgttcggcgccgccgagagcgcgcagttgagcgcgcaggcgtcggccggcaacgccgaggcgctgcgtggtgccgcgcaggtcgcggtgatcgccgacgtggtgcgcagctatctggatctgaccgtggcgcaggcccagcaggacctgttggcccgccagcaggcggtggacgatcgcggcgaacaattggccctggtacgccagcgcctgcgccttgatgagcccggcgaacttgatcgcctgcgtgcacgccaggccgccacccgcgcggccacggcgcaggcacgggaaaacgcggacaacgctgcccgtgcgttggctttgctgctgggacgcgacggcccggacccggcctggcgtgcctatcgcacgccgccgacgctgggtgccttctcgctgcagcaggtcccggccgatctgctgcgccatcggccgcagatcctgctggccgaatcggaggtgatgcaggctgctgccagcaagggttcggcacgcgccgcgatgtatccgcgtgtcagcctcggtggctccatcctgtacgcctacaacctcacccagaacgcccgctccaattccgattcgagcccgtccatcggcccgtacatcgatattccgctgtgggactggggccagcgccgcgcacgcttccatgccgatgaaaagcagctggatgccgccttgctgggttaccgcaaggcggtgctggaaggcgtgagcgaagtggaaggcgcgctcggcagcctggcgcgccaggacagcagcatccagtcgctgcgcgcggccgatgatgccgccgggcaacaggtcaagcggcaggcgcggcaggtgcagctggggctgtccagcgaattcgacgggcttgacgggcagcgtgcggcactcgccgcgcaggccgacctgatcggtgcacagggtgcgcgcgtgctggcctttgcgtcgctctaccgcgccctcggtggtgctccgttgcctgtcgagggtgagggcgaatcgcaatgatcgcgctggcccgcaagaccctggcctatgaatggcgccggttcctgccggtggtgctggcgatgtgtttcgccggtgtgctgttgatcgtgcaggcggcactggtgctgggcatcttcggtaccgccgcgatctacgtgaaggcttcatccgccgatatctgggccggtttccccggcacccagagcgtcaactacggccatgcaatcagcgcggatgtcgaaagccatctgcgcatggacccggatgtcacccgcgtcgagccctacgagtgggtcgatggcgaatggcggtccggcgcgcagggcaccggcaatgtgtcggtgtacctgtccggcatctccacccaggacgacgcgatgatgttcgcgcgcatcctgcctgccgacctgcgcgcgcagctgcgtgagccgggtgcggtgatcgtcgacagcgccgatctggacacgctgggcgtggacctgcagaacaaccgtgcgtggatcaacggcaaggcggtgcgcgtggtcgctgcacaacccggcctgcgtggcctcggtggcgtcaacgtgctggcgtcgctggataccgcgcgcgccattgctggcaccgatccgcacgagggcagtacctatttcgtggcgggcctgcgttcgccggacttggccgaccgtgtgcgcgaccgcctggctgcgtcgatggggcaggccacgccggtcgagttctggactgcaccggcgttcgccagccgttcgcagcaatactggctgttcgataccggcgccggcatcgcggtgttgttcatggccgtcatcgtctgcttcgtcggcgcagtgatcaccaaccagtcgttcgcctcggtggtggctggttcggtgcgcgagtacgccacgctcaacgcgctcggcgcaggtcgctacgcgctggcacgggtggtattcgagcaggcattgctgatcggtggcgtgggcatgttgctggcggcggcgttcagtaccgtcgtgctgttgatcgcacagtcccagcgcgtgccggtgcagctgacgccgatggtcatcatcggctgcgtggcgctggtcgcggtgatggccatgctgtcgagcatcatggcggtacgcagtgtggtccgctccgatccatcgttgctgctgcgttgaggaccggccgatgacgtccaaacatgccgtcgctcccacgttgcaggccgacgcactggaaaaagccttcatgtccggcgatgtacaggtgccggtgctgcgcggcctgtcgctggacatctatccgggcgagttgaccctggtctcgggcccttcggggtgcggcaagagcacgctgctgtcgctgctgtccggcctgtccgcgccggatggcggtcgcgtgcacgcgctgggtcaggacgtggggcacatgacccgcggcgaggtggagcgcttccgcctgcaccatgtcggcttcgtgttccagggcttcaacctgttcccggcactgactgcgctggagcaggtgcagctgccgctgggctaccgcggcatgcgcaatcgcgaaagcgagccgctggcgcgcaaggcgctggaagaagtgggcctcagccaccgcagccacatgcgcccggcgcagttgtccggcggtgagaaacagcgcgtggcggtggcccgtgccttcgccaagtcgccgacgctgatcttcgccgacgaacccaccagcgcgctggacgccgagaacggccagcgcgtgatcgacatcctgcaccgctacgcacgtgcgcatggcgccaccgtgctgtgcgtgagccacgatccgcgcctgatccggcatgccgatcgggtgatcgccatggaagacggcatggtccgtgatgaccgccgccagaacgaaaccgtagagtccgccccatgaccaagacgtcgcacctgcttcccctcagcctggtactgtccgcggcactgctgctttgcgcctgttccagggacgcgcccgcccaggcacctgcaggtaaagccagcactgccaccgccggcaaggttgcggtggcgcgcggcatcatcgatgtcgagggtggcctgatcgcgctggcgccgccggtggatggttcgatcaccgccgcgctggtgaaggagggcgccacggtgaagaaggggcagcttctgctgtcgctggacggtgcgctgctgcagcaggaagtggcaatggccaccgctgatctcgcacttgccaatgaccgcctgaagggcagccaggcgcagctgcgcgaactggagcgcaatgccacccgcctgtccacgggtgcgagcgaaggcgtgtcgtccaaccagcaggccgatgcggccaagcagcagctggctggcgtacgcgccgatgtcgacgtggccggtgcgcaggtcgacatggcccagcacaagctggaacacgccaggctgaaactgcagcagatgtcgctgagcgcgccggaagccggcaccgtggtcggccaggtgccgggcctcggcgccttcgtgcaggccggcaagccggcgatatcactgctgccggcgcgcccgctgcaggtacgtgccgaactcagcgcggcctacgccgatgccgtgcaggtgggcatgagggccaccgtggtgccagacagcgatggtgccgagaacgccagcacgctgccgcccgcacgcgtggtacgcatcagcccggtgttcgcgcaggctcgcctgcctgaagacgcggggcgtggcgtggccaaggtggtggagtgcgtgctggagttcgatggcgaggccaaggcgcgcttcggccagcatgtgcgggtggagttccggaagtaggcctagtgctgcaacgggggcgcatccgcgcgccctcgacgcctgaacgcccgccacgcgctcaccgccgacaccatgcacagcgccagcagcaggcccacgtccaacagcagcagccacagcagatgcatgccttgtaccggcggctgatgcatcgccgacagcatccacggcaccgaccacagcagcagaagggcgaaggcgatcagcaggcgcagccacaggcgtttcagtctccacggccgcacgatcaaggcggctaccaccagttcgaccgtgcccagcaacgcgaagacgatgacggtgctggtcgggtagggcagttcggcgccttccaggtggtgcagcagccagtagtccggagtgaagccggcattgaccagtgcggcgatcagcgccagccaggtcagcgcgaccagcagccagaacaggcggatgtaacgtctaggcatcggtggtgtccgtggtgtagcgggaggttgcccgcgacgaatagcgcaggcttgcggcgattgcggccagtgccagcaggccaggtccagcggtgaagtacaccaggcgcagcggatggtcgtgcatcagcgtccagctggcgaacgccagcggcgccgccagcaccagcagcttggcgaacaatggccgcaacactgcgatcagcagttgggcgccaatgaacatccagaacagatggaactgggcgatgcccaggccgatgtcgcgatgggaggtgaagccaaaatggtcgcgataccagttcattcccagcggaatcaatgcccagtacagcagcgccaccagcagatgcagcagcagggcgatcaacaagggtttgccgcgaaggaacatgggcgcatggggctgggcggggcagcgtaccccagtgcggacgcccgtgaccgcatgatgtgaagactgttgacggcgtgaaggaatttggacacaatagcgctccttcgacgcaggtcgaacggaatctgcgggaatagctcagttggtagagcgcaaccttgccaaggttgaggtcgcgagttcgagtctcgtttcccgctccagattctacagggccccggcaggggccttgtttttctcccgccacggcaaggcggggcacgttgagccacaaggctttgcgcgcagtcagaaaggtgaaatcgctggtgtgttttccggatttccggtagcatgtcggcttacgcgggaatagctcagttggtagagcgcaaccttgccaaggttgaggtcgcgagttcgagtctcgtttcccgctccatgttccgacaggccccatcatggggttttgtcttgtcagggttccgttcctggcgcgcagtacgttggcctcatggcagagtggctatgcaccggattgcaaatccgtttacagcggttcgattccgcttgaggcctccaaataaagccctgatttatcagggctttttctttgcctgacgtttggcggcgctagccaaaatcccctgattcggccctgaaatcatcggtctgccacccgtttccgggtggcaaactcgcgttaacatgtgccgagtgcgtttacgtgagtttgagcagggatggcaaccaagcgacgccggggcgactcctggcagtacacgatcaagcgggcggggctgctgccccagccggtctatctgagcttcgccttggaggcagaaggggacgagtacgtgcgtcgccttgaggcgctgctcgaccgagggatagtgccggaggagctggccaacaccaaggcggcggcgaaggacctgcgcagccaggtaaccgaatatcggagcgcgcagcacatttctgtcgatgatgagcagttgctgcccgtccttctctcgcggttgcctatcggcatcaccttgccgcagctgaccttcacttgggcgaccgagtgggtgacctccatgaagcgcgagcagaatcttgcgccttcaacgatccgacactatgtgggggcgctctcccgtgccttggattggctggctgctcacggcgcgctgccaatgaatcctctgcgactcctgcctcggggttactccacgtacacggctgatgacaagatcgctgtgaagcacatagatggggaggcgaaagccgaccaggagcgcgatcgccgtctggaactgggtgaggaagaacgcatccgcgagatcctggccggcgcaaagccgccggggcggcagcgggctctcgatctgccgcagcgggaggcgctgatactgatgttcgacatggcgctggaaacagccatgcgcatgcgtgagatctacacgctcgagcgcagccagctcgatgtggcacagcgcacgatcttcctagacaagaccaagaacgggagcaagcgtcaggtacccatgacctcagttttgctggcgaagcttgccgcgtatgagggtgactacgatgggcggcttttaccattctgggcaggcgagcgtagcccgctggccctgcggcgtgtatcgagtaagctgtcgcgtcagttcgagcgcatcttcgttgcggcagggtgcgcggatctcggcttccatgatctgcgccatgaagcgacgagccgactgtacgaaaggacctcgctgacggacatccagatagcaaaaatcactgggcatcgcgatccgcgacagttgaagcggtacgccaacctccgcgcttctgatttggccgatcagctctggtgatcggcctgctcgtaggcgcggaggtcgggcagcttggtgcggcgcgacttgctcgcacgtcttgtcggcccaggtgccggtgagttagctgcaggctgggtgccgatcgccgacttctttcgctcagcagcttgcctgcgtccttccgagcgcaggaagtcgatcaggtcctcacgcagcatgacggtgtgcttctggttcaagcgcacggcaggtacctcacccttgtccacgaggtccttcattgcctctaggccgagccggagcatcctcgcggcaccctccaagcccagggtgtcgtcaacgtcgtccatggcctggtgtcgcttggcgctcaagcatggctcctttcagcttcgcgatcacgggatggcggcccctcgcatctcatgcggacccctggttgatccggctgcgtggcagaatgcgctccagtccacatggaggttgctgaatgagttgggtggaaggattggcggcatgcgctccgcttggaaaggcttgcgttctcgactggagcgccattgcaaccgcatcggcggctttcgtcgcactcttcgtaggaattgctcctttggtgtggggtaaacgccaacgagctcgcattggcagagctaaggcgcggattgccgaagtcgatctgaaaatgcaggcgttgcatttggctgctggccttcacttgatctctggcaaggtcgttcagcgtcacaactatcgagtagcgatgcgtcaattccgagcgctcaatgccgatagctgccgagaccttgtgccttacttggactctctctcgagcggcctggaagcccctttgagtgacgtcatatctgacattggcatcgcaattcggcttctcgaagacatggactccagagatgattccatggagacaaacccttctgggccaaggagcctgtacgaagaacttcttgaaaccatggaatctgcccgtaaggccctctcgacggcgatcggcggcgggtacgtgctggagccattggagccagatgcggagaggcttgcagaaacgctccgccgatatgcgatggacgagctgatggctgaagtgctgagaggccagcacgttcgatagggatcgcaaaataggtcggttcatttgcccaccacctggctgtcgaacacagcgaatgcagccttgcaggccggtttgccgcaacgctggcggccagtgatcgtctcggcagcaacctccgtctcctcagtgtggaaggggataccgcaagcgggaccacggtctgccccccacttgttgccggggcgatccacgatggcgtgccacttgggtgggcgcgggttgtgaccgtggccggctggacatgcgtagaacgacgcatcgcgcagggcggccttcacgattgcaccgcctggctgtcgatatgccgctgccgccggacgtcgatcacgcccagcaccgagttgcggcgcaccacgtcgtgcccgtcgatctggccgactacgccaaccacgcaaacggctcggcgcagttcgtccaggtccacggcttgtgcgcgcggggactcccagtggcccgtgccatcgttcacccatgtccatccagtggaggcgagcacagcagcggctgcggcgttcttgcgcgcatcatcgacggcgtccattgcggtcctgattgaccgattggtgggaaacgccgggtgatcggcggcgcactccttccaacgagcatcgggatcgacgcctaggtgcgaccagagcgatgccagcgtagccgacggcttgcggccgccattcggatagatgcaaacgtcggcgctgccgcccttccgatgccggcgaacatggtgaacctcgcgaatccagcgcatgttcccgttgacgttgctggtcacgatgaatgtcgcatcgccaaccgtcaggcggtgcttacggttgcgctgcggcgggtagtcgggatagtcgatcatgctcactgggcaccttccttggccgcgcgcgcggcgaggtagtcgcccagcacagtgccggtctgatcgtcggccaagacattggcggaacggggggagataccaacgctgtcgtcgccttcgtcgaatgcgccctggaagcggagcagcggcttctcatgccattcgtccggcagcagatgatccagaacgccctcaccgaggctggtgctcagctcgcggacttcgtggaactcatgcagacggccgttgtcccatgccatccctgcgcaggtctggcagatgaccacctcgtccgtgcggtcgcagttggtgcaggcatagcccaccggctcccccaccggctggcgggcgccagagagcgcggcatactcggcgaaggcattgcggatcgcttcgcgcgattcctcgggtgcgtccgtggtgaggtagccaagtacccagtcggcgctgatgcccaccggctggcgggcggcgagggctgcgtggatcgcattccgtgcagcgatcatgtcgaactcgtcgccttcgcttcccgccacataggcgtcgacccgaatgcgatcaacctctggccaatagtggggcgcatcccccagtctcaccctcccaccgggctgcacgtccgccagggtcttgttgtcggtggtcatgcactcttctccagaaggaaattggtgtcgatgtgccagccggcctcacgggctccgagcagtcgcagctcgttggtgtcgaattcatccaggccgagcatcctggcgacgagctcgatgtggttcggcgagatgggccggtcgcggtagaacaggtcgtagacgttgtgcttcgagcagccccagacctcggccaagtcctgcatgcgcttgccttcctccaagaggtggcgcttcaagtgcgcgcgcacgctgtcgaccgagcgggggatgcgaatcggacggccaccggctgccatgccgttgttggcgtgctggcgtcggatgctcatgcggcctccgcctgcggcaaagccaccgggtccaggttggcgtcgatcaaggcgtagaacggcggtgggctgacgctattgccgcacatgcgcacctgggccgtggtcttcagtaccgtgccgtcggcggtgtggtcgatgatgtaggtcaccgggaagccctgcgcgcggaagagctcatgcggcttgagcatgcgcaggccgatatccacgatgacgtagggcgtgcccttgatgaccacggtgaccagcgccaagcgatccttggtagtcaccgtgtctactgggtcgtgcagatccacggcgatgccgctgccgtagtacttcaccaggaacgctgccacgcgcagggcgcccgcttcctgttccgggctcagggtgcattccacttcggcgaagcgcgttgcaccggcgagcacggtcggaagaggcacccgcaggtcgttccccaccacgttctccgccatcgccgtcaggtgtgcagcgaccaggcgctgctggctgccgctggcagtaatggtgctgaccgggtcgcgagcatcgttgcctgccccctcatagaacccgccgttggcctgttccagaaatgcggtcgccaacccatggtggttgccttgggcagcgatggtcgctatcggctcgcacgcatcgccacccgccatgttgttgcgcagggtgaccagtgacgcagcggccacgccgagggcatgcgcggcgcctgccgggcgtgcggcaccagcaccagaagtgatcgtcggcacgggctcggtggccgccgtgccgatgctgtcgccgcggaacttcaccagatgcggcgcggccacagcgtgctttacaccgcccgcgacaatcgtgcccagcggctgctgcagatccagcgcacgcggggcctggccctcgcgctcgccatagccggtctggacaagtgtcggggatactaccgagaagtgcccacccttcactccggcgcagacggtaggaagtggctcgtccgctgccatcgtccgttgacggcttgcgttggcatgctcggtgaggaacggcgccagctccggcgccaccagcatcagctcgccgcgattggcggcagtgatggtacgcatggggtcgcgcacgctatgcacgcgatctccgccctggtgcgttgcagggacgatgaagggatcggccgagttgatgacgtgccgcatgacgcccttggcgatgcggcgcatggttgcgtcggccagcggccggtcccgagtaaagatggacgggcagggaatcgagaagtccaggcaatcagcagcagtcacgcgcggcttctgtcccggggctgtgccatgggtcggctcgggccacacgatgggctggccatcgcggcgaccgagcaggaacagacgttcgcggctggtgccggcgccgtaatcgctggccaccagcttccgccactccaccgcgtagcccagcgcccgcagtgctgcgacgaactgccgccaagtgcggccgctgtagcgcttatgggggacaagagcctggcgctcgacgggcacccgctcgcccttgtcggcgactcggttgaccatgaccggcttgccgcgccggaacagcggctttcccgactccggatgcacggcctggaccaagtcaagggtgatcacccggccggacttggagcagcgctttgccaccagcggaccccaggtcaggatctgccacacgttctccatggagatgatgcgcggcgcggtgttggtcccgtacagccgatcagcacgcagcagctggccaacccacttcagcaccacccacgacaatgcgcgggtcttgcggctgcgcggctggccgcccttggcctggctgaagtgcgtgcagtccggcgaggcatggaaccagccgatgggccggccggccacgtccacgcgtgggtctgcgtgccagatatcctcgcggtggtgctgggtcagggggtggttggcggcgtgcatgccgatggccagctcatcgtggttgtaggccagggcgggatcgatgccgatggcctgcttaagcccttccgatgcgccgccaccgccggcgaacagatccacgacgatctcgccggggcgcaggcgggagacctgtggcggcgggaagttgaaggagcgggaaccgtcagccatgtgctgcctcccaggcaatgatcgcctcggcagcaagcggtcgcacgaaccatgcggctggaccatcttcggtgtcacccagccacaccaggcgccaatctgcgtcggggccaataggctgccacgcgcgcatctcgtcccagtaacgatggtcgccgctctgcacggcctcttcggtgaagtcgccagacgtcacctgcaggtcgaatccctgcgcgaggaacaacggccgcaacgacacctcgcgaccgtcagcccacattggcacatccggatggcacgggacctcgccgtcggcgttgcgcgccgggagccgactggggtggtacaggccgcgccacgggtctgctggatcgacagcggtgcgggactgattcctgaccagctccagtaattcggtcgcctgcgccagccgggcacgggtggtgtcgcagagcggcgtgtcgccgtcctgcatgctgctgcgcagagtcgccacataggcggttactgcggcttcgaacacgcgcagatcctgcaagcgcggcaggcggtggtgtagatcccgcagcgcggtctgggcctggccgagggtgatggccttcgcctgattgggcagccacacggcctcgacagcgatcgcactgatcgtttcgaatgcgtcgcgcagaacggggcagttcgtgggaagaagcgtgaggttcgcggtcattggcgggcctgatcgaatagggtgaaagtgttcacaaaggcgccagcgagcggcgctttgcatgcggcgtgggtgtccccggacgggcgacgaggaaacggcggcatgcggcggtaccggccgttgggatcagcggcgtacttcccgtctctgagtcgcaccgcctggtactggggaaatgcctcatcaggcaatgcctcgcgcgcctccttgatcagcgcgacgaagcgctcctgccagtcaatgggcatggactgcagggttcggcgcggcaccaccaggtaggcggcgcgactgaggccgaaggcatgccaaaccggcccatcggaataggtactgccaggccttccgggttcggtgacggtcgccgcgtgcgaatcgctgctcatggaggcctcagccgatatcgtgggttgccatgcgctctgcatagctaccgtggttggccgcgtgacggctcatcagcgggcgaagcggggtgtgccccagcacttcgatgtgcccgcccgctgcgaggaaggcgtccaggtcgtcggccaactgctgccggtcgagttccctgtgtcgaatcgtggtcgccgcgtcactgacgccggtgagcggacctaccacgcaggtcggacgctcacgcacgggtgccgcacgcagcggtgcgatcgcatgttgcgtgtggctggataggcgccagatcccgcgcacgccggagcgatggcagatggcctggccgctgcgtgccaaccctttcaacgtgtagccgatagcctggtgcgtgctgttgatgcgaccagcggtcttgatctgttcgaccgtagcgccttgcgggaacatagacaggaccttgcgcacttcggcggcccggccgatctgttgcgggcgggcgctcatgcgcgggcctccgcgagcagttcgcgcattgccgagccgtggtgcaggacacgcgacgattggtgagcaacggcgtccggattgttggtcaggacgagcgtgtcctccaggggatacgcggtgtggccgtcccagtcgtccagtacctcccgcaggccaaagtgcgcgcgcagttcctgtgcgttggaggtcttgccgcagcgttgcggcccgtagatgacaacagaacggttcatgcggcgattcctcgcgtgcggcgcgtagcgcggttgttgggggagatcgaacgaacgcgcacgccttggcggtcgagccagcgatgcgcggcctgtgcggcaagtcggtttagagagaacgagacgccaccgagggtgagcgagtggtgcgatacccccacgctccggctggcgctggcggcgaccttcaggagcgactcgcgcggggcagcggtgtagaggccggcccatagccagccttggcacaccatcagcacgagcgactcgccctggtggccggtggcgaactgctgctcgacgggcagcgttggctgcgcgctcatgccgacagcgccaggtcacgggccttggcgatctcggcctcggcggcggcgatgccgatggcggtcaaggtcgccttgcgcggcagctgcgggtcgtcgtaccggatcagcacgcgctcatccagccagttcatgacgcgacgcgtgaacagcttctcggggcggttgcggggtgcaaacccgttggcagtgcggtggagggagtgatccgaagcgccatgcgctgcgagcaacgcggctttttccttcggcttgagtggagcggacatgggctgttctcctggtcaggcagcgataggcgtggaaggggagtcggcggcgatctcggccagtacctcgccgcgatggcgggcgagcagggagatcgggatgcgaaggtgcgcgaggcttgcgtcagtccaacgcagctctgccaacgcggctttttccatcggtaccgggcgagtggctaggccacaccggtggcattcgatgtgcagcagcggcgggcagggggcgcccaggcgatggccggtcggggcgccttcggtcaccacgatgtgaggtcgatggccgggcccacacagcggcacggaatcggggagcgggcgagaggtctggcgcatggtcagcccctcaccgaggtgctgagcgcccagcgtgccttggccgcatcacggtcagcatgcgcttggtggatctccgcgatacgcagcggcacgacaacggcggctgccagtgcgacggctgcccaagcgaggcggaggcggcggctcatgcagcaccgccgttggcatgctcggctaggaaggcttggatcttcggggcgagggtgtccgccagatcgaaggaggccgagccgagccacagagcagcaggggcgtgggtgaaagcatcgggggcatctacgcgcggtacttggccgggactggcgcaggcgaaggcaatccctcggtgcttcctgtccttccctacgaaggtgtagagcgatatgcgccaggagttgtcgccgtcccgggtaaggccgaggttggcgccgaagcacttggcagtgaaattgactggggcgctcatgcccgcacctccgcagacatgtcgcgcgagcaggcctccaggcggaggctggcgacgcccatgcgccgggagcggcgcagctggttgcggttgtgttcgcccttgctgcgtacccatagggttcgggcggtgctgtgatcgcgtgctgccacggcccgcagggccttcacggccaacagcggcagcaggcaggggcttggatcggcgtagcgatgggacatggcgcgctcctgttcgaaggagggcgccggcgggtcaggtgccgagggggcggctgctgccggtcaggggaggggccggcagggtggcgacccgccggtcgcccgccagctagagagctggcagggcggactctacaaacaaacttgcgtgcaagtcaacaagaaaacttgcgtctcggacattgcagggctcaaggcgcccgttgggggcaggtttggcacccggctgaataggcccatgggtgttaatctccgggccttcaaaggaggagggggcctatggaagttttcttcagcacgatgggtgcgttgggtgtttggctcgtggcgcttgctgtgtttgcattggccctgctggggctgctcatgcccttggcggtttttggtatcaagcctctgttgcgggtcctgatagaggagcaacgcaaaaccaaccgcatgctcgcaaagcaggggcttcgggatcagggtatggaaccaagggacgtggcaagtgttgccacgtccagagacgacggtgagccgcagacgctggaggaattcattcgcgagcgtggtgggcgtagcccgtaagcccgccaattatgggcgtggcagcacttcggccatgttcttgataagtccggtttgttcaagggggaagccttcgatgatcgcttccctcgcttcttccatctcgcagagcagcgtgcgcagctctgtcgcggataggtcgctgagacgttgtctcaggattaggtgctggtcgactagccagttgagctggaaggcttcgcgcagcagccgaatcctccgcatgtatgccagggcgatggcgtcgctgggcccagtcgtatgacactggcgcaggcactttccatcgggcggctgagcttgctgccgaaccttgctagcgagtgcctgcgcgagagcttccagtgctgccgcttccttcatgatcaaccccctttgaaatctggcgcttccgcaggtgtgcggtgaagtcgaccacgttgtccggcgtaactgccttctcctggcgcgcagccaggtagctgtgagccaagatgacaatcgaggcgtcgttcgcgtcttctgggtcgaacgacgatccaagagcgaggcaggccaggcggacaagttgatacgacgcggcaagggtaggagcgtcgagttgcacgggttgagactgtgcggaacgaggtgaagagagcgcgctaaggggctcgcttttgtcccagcttaggaactgctccacagacataccgaatgcccgtgccagttccagcatgtacctggggcgacgggtaggggtgtctagtagttgctggatatgctggtacttcacgttgggagcgccagcagcgcggacccgggctgcgagagcctccacgccaagcccgtgggcctccatcaggccccgtgtgatttcaccgatcaacatgcaaacaatcttgcactgttgattcgcaagaaagattgcgctagtttgtcgcaagaattcttgtgaacgggcattccatgacccctctgcaacgggcaatcgcgatctgtgggacccagagtgagctggcgcggcgggtgaccggcaagcccgcgaccggctacgtctatcactggcgaaaaaacggtgtaaccgaggaggtggcgattgccatcgagagggcggtcgcctcggcgatggctgagaaccaggacgccgcgaagcgagccgataccctcggaggcagagtgacggccgacgagctgataccggatgtgcgctgggagcgtgatgcgggtggcgccatcgtcggctacttcaagcgcgtcagcgggttgccggggatgactcatgccaacccgtgaccctgcgctaattatctccatagctcgctacggctggctgcgcgggcaccagcgctaccggttgttccgtatccggcagcagatccgcaagagcggggtggttgtgatgctcctggcgatgattgcccttcttgtactcggagtgcagaggcgcccacaggactgcaacaaccccgccggctccggtgtgaacgtcaaaggatcggatggcctgaaggcgcatgcgcgtagggaacgtgatgatctctggcatgagggcaatgttgagtacagcgctcccctggacggaacgatgaaatgttccgcatttcagggggctgcatgacctgtctccgctctgacctgtattggcgggacgccctgcacaacgcagtggcccgcgccccaggtgggctgcaggatgcggcagcccacatcagcaagcgccgaggcaagtcgatatcggcggagacactgcgcaagaagcttcggggcatcgatggtgaatcggtctcaatggagatggccgagatcctgacggactacttgttgctgttcgtcggcacgcaagacattgccacggactgggtttgttcgctcgcaggtcagtacagcctgatggttgactacgtgccgccgccgccgaagggcggttggcccgatgagctggctgcgatccaggcaaagctgctggagctgcacaaactgacgggcgcattggccggtgcgggtatcgacgcgttggccgaccagcgtctgaccgttccggaggcggatcgaatccaagacctgtcgcgcgaggtacgcaagctctgctaccgcctcgagcgcaacgcatgccgtgcggctggacagcaggggatggaggactgacgtggcgacccaccacgcccatcgatccaagcatcgaaggcgtggcctacccagcgcatctgcgcggcaagccatggaactcgcagcactggcgctgactgatgcagtgcccgggttgattggtgaagaagcaatggcggagcgcgagcgcatccgccagagacaagagcaacaagacaaccggcagcacagcctgcctttggggaaccctgatgtaccaagcaagcattgatgtggccccatccccccgggtggcttgtgaaaggccgtgtgctggacccgctactgaatccgccctgggattgagaggcgttctcgataccagcgatgggtccttcctggacctgacgaacgcgggtattccgacgcgcatttcctgggtagatagcagctcgggaaactactgaatgtctgcaagacttcctaccaacttcgatgacgtgctttcacagctacagtcagcggggctgctggtaaccggggccgatctactcaccgatggccgcatggtgcgatgccgtgtcagcggttcacgcgaaaagcgcggctggtactgccttcatgagctcgatactgacgatggcgacttgctcgccataggcacgttcggcgtgtggcagggaaatgagaatggcgccacaaagatcgatctccgaaagcgagacggggccttctccgacgtgcagcgcgaagcgatgcgcaatcgattggcggaggatcgtcgcagggccgaggccgcgcgcaagtcccaggcaaagcgtgcggcagacagggctaccgcagcttgggccaaggcccacgcagtcggtgaggccgattacctggtcagcaagggagtgcagggctttggattgcgctacggcagcacgggcgtggcgctggtgccattgctcgacaccaacggtcaggttcatggtctgcaggtgctgcgaagcgccaagcaggcagcagccggccgcaagcccgcgaaggagtattggccggcgggtatggtcaagaaggggcacttccacctgatcggcggtagcccacaatggatactgttggtcgcagagggattcgcgaccgcagccacattgcatatggccaccggctaccccgtggccgtggcgttcgatgccgggaacatgttggctgtggcctcggctctggcgaggcgctaccggggcgtcaagatgctgctgtgcgcagacgatgacgtgctacagaaatgcaggcactgcaagagccggctggtgctcgccgagcacccgcagttctgtccctcctgcgcgcagccacatggcgcatcgaacgcgggcctgctcggcgccggggccgcagcgctggacgtgggcggagcagtgctgcatccggtgtttgcggacgaatcagccaggcgcgagcgcttcattgacagcggccgcaaggtcagcgacttcaatgatctgcacgctcaagagggcctgcacgttgtgcgggcgcaggtcgaggcccgtctcacggagctgtcatggcgggtgcccgccgaaaaacgcgcgccttccattaccagcgacgggggcgcggggaatgaccgcctggcgccgatacactcgttgaacgagttgctcgagcgcttcgccctggtctacgggcagggcggcacggtgttcgaccacaaggaacatatgctcgttgcgctgggcgatatgcgtgacgcatgcgtgcgcaaggaactgcaccgggcgtggatggagcactcggatcggtccatcgtgcgcgtgcgtgaagttgacttcgatccgtcgtgcgagaagcctggggtgacgtgcaatctctttgccggttggccgaccataccgcaggagggcaactgcgaccggctattgcagttgctctggcacatgtgcggcaacgaggccaatcagaaggcgctgtacgactgggtcgtgaagtggcttgcctacccgttgcagcaccctggcgcaaagatgaagtcgaccatcgtcattcatggtccgcagggcaccggcaagaacatgttcttcgatgagtacatgaagctctacggtgactatggtcgcgtgcttgaccaggcggcgctggaagacaagttcaacgactgggcaagccgaaaactgttcctgctggccgatgaggtggtagcacgcaccgaggtgtaccacctgaagaacaagctcaaggcgctgatcacgggtgaccgcatccgcatcaacccgaagaacatccaggcctacgaggaagacaatcacgcgaacctggtgttcctctccaacgaggcgatgcctgtcgtgctggaggaggatgaccggcgccatgcggtgatctggacgccggacaagctcagtcaagagttctataccgaggtactggccgatatccgcaatggcgccacggcggcgctgcaccactatttgctgcaggtggatctgaccggcttcaccaatggcaccaacccgccgatgacccaggcgaaagaggagctgattggcctgagtcaggatagcccgcagcgcttcttggacgagctttacggcgacgacatccccgggctcaagcccatgccggcgctgtcgaaggagtggtacgaggtctacaaggcttggtgcgcgcgagagggcctaccccgcccagcaccttcgcccaagttcatcaatgcgctggtgcgcaagcgccagatcgtccacccggacagggcgcgaaagcgctaccagatcgagcagaccgtgaacggtccccacgggttcctgatgctcggcaactgcaccgtgcctgacgggaagacagaggcagcatggctgggagaccaggtcgtgtccttccgtcgcatgttctccgactacaaggggcgtgcgtgatcactgtgcccatcaatgtgcggtgtgtgcgggatgtgcgggcagaagtgcgggcactgaattgccgtgaatctcttgcggcagtgggcgtgtgtgggacgtgcgggcatcggcctacatgggcgggcgcgggcgcgaacgggcaccccgctgccacaccgcaacgcgcctcgcgtgcgtatacaggtgaccgcacatcccgcacacgccgcacacgccctgtgccacatcgattcagcggctatcgcatcccgcacacgccgccgcacagcccgcacatgctcgcgcgcgcgcgtttttccgctttaacgatcttcgaagggaatggagtagggggtatcaatggctgaggaagacctgacgatcactggcaaagagctagcctcgctgatcggctgcaagccgtcctacgtggtcgagctgcgaaagaagggcagggtggtggtgggggcgggtggcaagggattcctgaaggccgcctccctggagctctacgctcgcaccgcagacccggtctatgccggcatcgcccagcggcacgcagaggagcgtggcagctcgctgctggggagcggggagggtgccaatgctctcgaccccgacatcgatgacgatgaagaggacagcgacgaggacgattccaggccctcacgggccggccggccgcagaccccggattccgcgcgcaaagcaaaggcgctggccgacaaggcggagaccgacgcgcacatggcgcatatcgcgctgcagaaggagctggggctgctgctgcctcgcgcggacgtagaagccttcctcgctgagcacgcaacgacattccggggggcgatggagcgcctggccgatacgctggcgccgcagctagccgccacgctggatgaggctgggtgccggcggctggtctgggatgaggtgagccacgctttggaagaacttagccagggcttccgcacgttggcagccaaggcagcggaggctgcggaatgatggaggcacagagctgcctggcgttggtgctggcgcgctcgctgcagccgcgacggccgatgagcgtgtcgcagtggtgcgatgagcacatgcgtctgtccaccaagagcggcagcaagcccgggcgctgggtgacggatcgcaacccgcccctgcgcgagccgatggacaacatgtctgcccgaagccccgtccacgaccaggtctgcatgttcccgatccagttcggcaagagccagctggcgaccaatgccatggcttactggatggactacgcccccggcccgatgatgtatgcgctgccgggcgaggtgtccatgaacaaatggatcgcccagaagctcaaccccatgatcgaggtctgtaaagcggtcaagaaggcgctgaccagcaccgccagccgcgacagcgccaaccagcgcacgttcaaggacttcgctggtggccagctgttcgtggagcacatgggcagcccgcagcgcctgaagtcctcgacggtgaagtacctgcaggtggatgagatcgatgaggcgccgcagcagctctccactggcgacgatccggtgaagatgctagacggccgtacatcgtctttcccgaccacctacaagcggcagtacatcagcaccccgggcatcgcagggctcagccggattgcgaagctgtacgacaagagcgatcagcgtcggtatcacgtgccgtgtccccactgcggccacttccaggcgttgcagtggagtggcctggtgtggtcgcccgacaggagtcgcgcgtggtatgcgtgctgcgagtgtggcgtcgcgatcgaggaacactgcaagacagagatgattgccaaggggcgctgggtcgctgccaatcctgactcgcagatccgcggctacaccatcaactgcctgtactaccagtttggcctgggtccacgctggctggacctggtgaaagagtggctggaggcgcagggcgatccagcttccctcaagaccttcgtgaatgaccgcttggcagagacgtgggaagacccggcaatgcgggcagtcaagcacaacgtcatcaaggatcgtgccgagccgtatgcgcttcgctcggctccgcaaggtgtgctggctatcaccgtaggagtggatacgcaggacaaccgccttgctattcacgtcgtcggctggggacgaggtatgaccgcctggacgctggactatgtggaactgcagggcgatccagccgaggaagcggtgtgggtagccctgaccgatttgctcaaccgcgcaatcgagcgcgaagatggcgcgctgctccggccgatggcagtggccatcgacgctggtggccaccgcaccgaggccgtcaaaaactacgtccgtcagcggcgcatcactcgtccaatgtgcatcttcggtgccgtacccaacaacgctcccgtgctgtccaagggcaagctggctgacgtcacctggaagggcaagactgacaagcgcggcatcaccatcaaccacgtggggaccgttgcagccaagcactacctctacagccgtctgtcggccgacgccgagcgcaagcccgagaatcgcatggtccacctcagtgaccagctgccggaggagttctttccgggcctggtgtcggaggtatacaacccagtcaagaatcgctttgagaagaaggtgacccgaaacgagccgttggacacatgggtgtatgcctacgcggcgacccatcacccagaggttcgcatcaaccgcttcacgcgttcagattgggaccttctggaacaacggctggctgcgccgccaagcgtcagcgtttcacgcgaaacgccagctgctgcgtcggaggccgacgctcccactgattcccgtgaaacaccgagcgtgcctcgccggcaacggcccgcgcagcctcgcggcatggggaggcagtggtgagcaggaacacagtacgaaacaaggtgcgaatcagtgaactgaccgaggagctcgcggtcggcgccgcgctgcgcctgcggtgtgacagcgacgatatacgcagcgttgtggaggccgtggtggcctaccttgtcgaagagtacccagcccaggatctgtacatccccgccagcatgcagagcagtgcctaccctgtagatgcgatccggaaagggatgcaggaacaggagtcggtacggtcgctgtgtagaaggttcaggatcgacagacggacgctgtaccgtttgcttgatgagccttgcgccaatgagtaggtggtgcgggtgagttccccgagactcacccgcacttgatcaggaaactggcatccatgatctcgcggatgcctgactgatgagctggaccaaagacgatgtgcagaggctgaaggccgccatcgccagcggccagttgtccgttcggcatggtgatcgtcagatcacgtatcagtccgtcgaagcaatgttgacggcattggaccgcatggaagctgaggttgccgccacgacggctgggcgacggaagtcggcgacgcgccgttaccgcttcacgacgctgaggggcttctgacatggcggcctcgctgctggacagggtcatcggcgccatttctccgcaggcagccctgaagcgtcaccgcgccagggcgacgctggaggcggtacgcgcctacgagggcgcctcgcgcactgatggttggcgtgttcgtagggcgggggccagcgcgaacaccgatcacctggcagacgcccgcgagctgcgcaaccgcgctcgggcactggtccagaacgttccgtactgcgcgcggtccctccaggtgctggtgagcgcaacgattgggactggcattactcccaaggccgaagggccgaacgctcctgcgctggacaccctgtggggccgctgggccgaagtggcggacgcggatggaaagtcggacatctacggcctcatggctactgcgtatcgcgcgatggagcaggacggcgaaagcatgattcgccgccgtaccaggcgtcagtcggacggtctcgcggtcccgctacagcttcaggtgctcgagatcgactggctggacggcaataagaacgggtctgcttcgggcggtggccagatcatcaacggcatcgagtacgacgcgatcggtcggattcgcggctactggttgttcggagcgcatcccggtgaggccgtgcgcggctctgtacgcctgagtagttcgttggtgccggcgtccgacatcatccacctctataaccccgtccggcctgggcaggggcgcggcattacgcgcttcgcaccggtgatcgcgcgagtgcgcgacctgatgctgtacgaagacgccgagctggcccggaagaacctggaagcccgacttggcgtgatcgtcagtggcgacatcgattcgatgtccaacgcggacgatgacggcccttcccagctcggctcagatcgcgatcaagtcactgacctggggccactgcccagcggtggcgttacccacatcaccggcgcgactgccttccagactgtcgagcccaagccggcaggcggctacgtcgaatactgcaagttcaacgcgcacatcattactgctggcatcggtgtgccgtacgagtcggccaccggtgatatgcgtgaggtgaatttctccagtgcccgcatccggcagatggagttccgccgtgactgcgagcagatgcagtggctggtcctggtccctcagatgtgtaagccaatctggcgctggtttgatgaagctgccgcgctcggtggcggtgtgcgttccacgggaagcactgccgactggagcaccccccgctgggactacgtcaaccccaagcaagacatcgaatcagaaattgcagcgatgggtgccggtctcaactcgcccagcgaagcgctgcgtcggcgtggctacgacccggaagcggtgtacgccgagatgggcaaggacttcaagcggatgaaagagaccggcgccctcgagctgatgaccttccttcaatccagtggcgcccggaccagcctggtcgacgcctcaacaaccaacgaggaatgaccatgccccagccagcccaggctccacagcaggacggtacgacgcgcctcatgccacctcagttgcgtgaggccgaattgcagccaaccagcttcgatagcgaggcgcgcacgatcgagctccagtggactgctggtacgcgcgtgcgccgctacgactggtggaacgacacctactactgggaggagctggtcgttgatgaggcggcctgcaacatggagcgcctgtcgtccggtgctgcgccggtcctggacagccataacacctggggcatcggctctcagatgggtgtggtggatcgagcctggctcgccaatggcgaaggccatgcgcagattcgcttttccggccgcgaggagctggccggcgtaatcgccgatatcggcgccggaatcattcgcaacatctcggttggctacaccgttcagcgctatgagatcgagcgcgccgtcaaccccggcgatttgccgatctaccgcgcggtggagtggacgccgagcgagatcagcttcgtcactgtgccggccgacccggcagcaggtacccgcagcaaccaacccgcacaggggaccccctgtgtattcacccgtagcgcatcgtcgcaggagcacaccatgcctcagcccgccgcccgcgccgccgaaccggcggtccagcaggaacccatcaacaacgccccagctccggcagcgccggccgcagcaccggcaccggaaggtgatacgcgtgcagccgacatcgtggagctggcaacccgccatggccagaccgaacatgccgctggctggattcgcgctggtcactcggtcgatcacgtgcgtggcctgatcttgaccacgctggagcagcgcgatgccgctgctggcggcaacatcaaccgtatcagcgtcaccgaggacgagcaggatctgcagcgctccgctgtgacgcatgcgctgctgcaccgagcccaggtgatcgatcccgcaaccaagcggatcttcgcgctcaccggtgacaatccggtgcgcggcctgaccctgatggacctggcccgtcgtagcctggagtgttgcggtgttcgcaccgatggcatggcgaagctggagctggtgggccgcgcttttacccagagtggcagcgacttcccggtgctgctggaaaacacgatgcacaaggcactgcaggcggcctacgccgtcgcgccggacacctggtcccgctggtgcgtcacgggcacggtcagcgactttcgtgagcactcgcgctaccgcgtgggcagcatcggcaacctcgacaagctgaccgaggctggcgagttcaagaacaagaagatcccggacggtgagaaggcaaccatcagcgccggcaccaagggcaacaccatcaacctgacgcgtcaggcgatcatcaacgacgatctgggcgcgttcctcggcttggccaccgccttcggtcgtgccgcaaagcggaccattgaggccgatgcgtatgcgttcctggccagcaatccgaagctggattccaacaagacgctgttccacgccgaccacggcaacatcctggcagcagcagtgccgagcgtcacctcggtagacgcgatgcgcgtccagctcgcccagcagaaggatgtgggcgggaatgatgtgctggatctgtcgccggcgctctggctcggcccgaccaagtacggcagtgccgcgcgtgtcaccaacaaggccgagtacgacccggacgctgaaggaaagctgcagcgcccgaacgcggtgcagggtctcttccgcgacatcgtcgacaccgcgcgcatcaaggacgacaagtggtacctgttcgccgatccgaacgactgcccggccatcgaggtcgcattccttgatgggatcaccgaacccttcctggactacgaggaaggcttcaccgtcgacggtgtgcgctggaaggcccgcctcgacttcggcattgccgccctcgactatcgcggcgtgcagcgctgcggctgatccccaactggagcactgagacatggcacagaacttcgtatccgatggggacgtgatcccctggaccaacaccaccgaacagcaggttgcatcgggtcaggcggttgtcgtcggtcatcagctgggggttgccctggtcaacatcgctgtcggcgcgacgggcagcgtagccctgggcggcgtgttcacgctgccgaaggtgccgacggcggtcttcgagcaaggtgaaaagctggtgtggagcgcgagcgccaaggcattcgacggaagcgcctcgaccgccgctgccggcgacatcaccggtgcggcgtttgcctgggctgccggctccgccggtcaggcgacggccgaggtgcggctctcgccgggcaacgccaccaaggcgtaaccgaataggccggcaccgctcacagatgcccgtgtggcgtgagcggtgccggttcttccacagcgacaacgggggatcgcatgggcaccaccagcacgccgcgcggcgtacgcaacaacaatcctggcaacatcgaccgcacaagcacgccgtggcagggtgaggatcggtctgccgcagctatcgcacgtgagcagcgcttctgcgtgttcctgaccccgcaggctggcttccgcgcactggcgaagaccctgcttacctaccagcgcaagcatggcctgcgcaccgtgaaggagatcatcgggcgctgggccccgccggtggaaaacaacaccggtgcttacgtcctgcaggttgcgactgccgtgggcgtcgcaccttcggaggtcatccgcctggacaacgcggtcactctgagccgtctggctaccgctatcgccaagcatgagaacggcggaatgtactggcgcccggacgtgatcgacgccggtgttgcagaggcgctgcgctgatggtcggcggcggcgtcaccgccacggcgccctggtgggctgcaggtagcgtggtagcgctgtggctgctccgcgaaacgtggtcggcgttcctctcgcgtaggaaggagcgtaccgagaccgacgccaacgtggatctcatcaagggcctgtccgaccgtgtctccttcctcgatcagagggtcaccgcacaggatgagcggctgcaggctgaaatgctgctgcggctcagggcgcaggaggaggccagcgccctgcgcacgcgagtgcgccagctcgaatcgacgctgcgcggccttggtgcggttatcccgcccgaagacccggtggtgtccgcatgatccgcgctctggtcgtcgccatcctcctgctgctgggtgtcattgtctggcagcgtggctcggtgtccatcgctcaccgtacggccgacaaggccgtggcgagccgtgacgccatggagggtgagcgcgatgctgcccgtgctgaggccgatgccgccaacgaaaccctgaaggtagagcgcggcagcgccgccgccgcgaacaacctggcgtccaagtacgaaaaggaaaagaacgatgcacagaaggcatctgatcgcctcatcgctgatcttcgtgctggcaaccagcgcctgcaccagcgttggcaagcgtccgtcgccaccgcagagctgtccgcggccgccgctgccggcggccagcctgatggtcgagccgacgaccgaattgaaagtgcgggccgagctattggcgccgccgcccagtgcgacgcccaggtgagagcgctacaggcttacgcgatgctgtgttcgggaggtgcgcggtgagcgagctggagttcctgcgggacatggacgcgacgatccacgcgtcgttggcccttgccgggatggcctccacggccaaggtgacggcggtgaagagcggaacggtcactgagggcgtgagggtctacatcgatcgcgatgtagagaccatcggcgatcttcggcagtttgtcgccggccgtgtcgaggtgtcctttctgcgtgtagatgtcgaacctgaccagggcgaccgtgtagaggtaggcggcgaggtgtttgtgacctcgaagaagctcagtgacgacggctcgcgcagcgtctggctggtgcgtcgtggctgagcgagtcgaacccctttcctggcagctggtcgagttcttgcgcggtcgagtgcagatgatccgagccagcgacggatttctcaccgacataggtgcggggctgatcgttgtcgacgatgccgagctggatgaggatcagtcggggccagccacgctcatctcggtccaacagctgtcgcgcgtcggcggtgggtctgcccaggtcaactccgacgcctcggtcacgattgagtttgaggtgccgcgagagagcggagcggtgaaccctcgactgctcgtgcaccgcgccaggtacgacctgattcgcgtgttgaccttcaacaacaagctgctgcccaagggcatcaccacgtttgagttgcttcaaagccagatggcaaccctggaagacgacgcagggcattccgccgtcgtcgctcagatcaccgcgcgggctggtctgaccgagacctttgagcccgtccccaacctgtaggagcagcaccaccatggcacagcccaaagttcgcaagttcgcaggcgatctgcgtttctgggagcacggcgcgaacggcgcccgcattcccgtcatcccggagccggccgacaagttcggcaaccagccgctggaacagtcgtcgttgacgttcagctatgaagctggcgactcggtggagatcaagagcaagcgccgcgacgcgcgctatcagcaaatcatccacaaggattccaaccccggcgtcaccagcgtctcgatcaccgcgctggaagtgccgacggccatcctggcgcgcatgctgtacggcacgctggtggccactcaggtcgcggccggcaccgcgacggacgtatccgtgactgtggctagcgtggacacgccggtgaagctgccgcacaacttccttctgtccgataccgagccgactttcaagaagggcacggtcgacttggtcaagggcacggattacaccctcgactccgcgcacggcctgctgattccgaagtccggcggccagctgcaggcgggcgataccgtggtggcgaactacaagtacgacgcctatctggaaaccgccatcagcggtggcaccacgccgagcaagtccttccagatcctgggcgacatgcaggaccgcatcagcggtgacgagggcctgctgaccatcccgaacgtcgacctgaccgtagatggcgacgtggactggttcagcgatgagccgatccaggtgacgctgaccggcccggtgatcttccaggccggcgaggccgatctgtacacgttcaagatcgcagcgcagtcggcgggctgaacgagctgttgatttcggcaatgggagggcgcccgaacggcgccctccaagcatgaatcaggaaggttcagtggcgtccaatcgcaacaacaacctgctcaagtactacgtcagcggtcggcgggcaaagggcttccacggcctcgccgacctggctggcgacgtgctgaaccggtacgacctctcagtgcggcgcgcctttgttgggctgcagcgccgggcggggccggccacggcgcaggaggtccgcgcctcctacaacatccgggcgtctgctctgcgaggcaagtaccgcgtggagactggcgagcgtggctacagcgcgggcaagcgcggcaaggatgatttcctctccatctgggcgagcacgcggcagatctcgttgatcgatttcaatggccgctggaccggccgtaaatccaagggcgctacggccagcatcggcctcggcgagtcgaagacctacgagggtgccttcatcgccaccatccagggccgcagggccatacgggtgcgcagctgggatcgcgcccagcagaagcggcacgggcgaggcccggtgcgcatcctgcgggggcccagcccgttcgaaatgctgtccggcgccgatggcaatagccgcgccttggcagcccgtcgtcgcctgatcgatcgattccacaccacctatctgactgagctgcgccgtcagtggcgcgtcaacggaagcaccaatggctgatcggctggaagaagcaatccgagttgtcatcgagacgcagggccgcgagggtgtggacgaactgcgtgcggcgttcggcgaccttggcgatgtgtcggtcgaaacggccggtaaggcctcgaagttgctcgattccctgacggggctgaacgaagcagcagcgaaggcggatgccttcgacggcatgctgaccgacctcgccgagctggagcagcagtttgacgccaaccagaaagccgcgctggccctcagtcttggcatcggcgagatggagaagccctcgcgcgaggtgctggctgcccagcgcgaactgcggaaggagggcgagcgcctgcagaaggcgctccatgagcagtgggatgcggtcgccaaggctgatagcgagctgtcctcgctgggggtcaataccgccaacctggccgaccaccagcagcgtctgcgggtcgaggccacccgtagtgcggcagcactcactgagcaggccagggctgccgcagccgaagccgaagccgggcggaggcgtaagcagcagatcgaggaaggcgagggtgccttccgcaagcaggccaccaccagcaaggcggcggcgaaggcgttggctgagtaccgcgagcgcgccgctgacgccgccgccggtagcggtgaccttgcctctgccaccgagagcactgtcagctggttgggcaggctcaaggcggtggccgctggcgcgatcgcgtttgtcggactgaaccgagtggtcgatggcatcaaggccatcgtgaaggaaggcagcgacgccgagcaggagctggcgcagctggaagcagccttgcacgccacggggcgcactagtgagttcaccgcgcagagcctggccgccatgcgccagcagctgcagagtggactgtttgacgatgggcagatcagcgccgcccaggtgcgcctgctgtcctacaccaatattgtgggcgagcagttcccggcagcgatgcagatcaccatcgaccaggcccagcggttgggcatgtcgctggagcagtctgccgaggtcgttggcaaggctctgcagacgccgtcgaaggctatggagagcctgagcaagcagggcttcacactagatgacagccagaagtcgcttatcaagagcctggaagccaccggccaggtggcaaaggcgcaggccatcatcctcgatcttctggccgaatcctatggcggcgcggccgcagcggcgaaggtaggcacgatcgctggcctgtggaagacagccactgatcgcttcaaggattggaagcaggaagtcgcagaccagggcgttctgacctacttcaaggggcagctgtccgacctccttgccacgctggacagattggccgccgatggcagcctctcgcgctgggccaagcagacagcccaggccatcattacgatggccgaggcggtgaagggcactacccagtgggtggtggagcacgcgcgggtgattggtctcatggccgccgcgtacgcccagttcaagctgatcggcgcgctcttgcagctgaacgcgtggcgtgtggcgcttctcgccacgacacgtgctcagttggcgaacaacgccgcagtggccgcagggagcacgggactcggccgcttcggagcacttctgcgcggtctgccgaaggcagtgccgattgcagtgacactgctaggtctggaggctgcgattggtggcctggacgtactgaagaccgttgcgcaagacatctggaagcagcacgacccagcactaaagaaggccggcgaggcccagcgtgcgtacatcagccaggtgcgggattcggcgctagagcttcgacgccaggcactctcattcgtctcctatcgcgaggtcgtagttaagactgcggaggaggttacccgaatgggtgcggctgagcgcgaagtctacgctgcccgcctggccggccttgagcagtacctgaccgcgcaggaagggttcttgttgatgcagcagaaggctggcgtggcaaccgccgcacagctgcaagagttgggtcttgtcacgcagcagttgctcaacgtatcgactggctacgcggcgctatcccgtggcgtaggtctggcggccgatgccatacgcaacggcattggcggggctgctcagctggtggtcgaccaaatgcaaggcatagaccgcaatgcacgcctcgcaaccgagtcgataggtaagatcctgcagggtctgaactatgcggaaacgggaagcctggaagccgtaggcacagctctcgggttcattgcttcgcagggcgcggcagccgagcgaaacgttcgcgacggattgctagagtcgcttcagcgtctttctggcgaggagctggcgcgattccaggctgcggctcaagcggcatttgaatcgcttccgcaaggtgctgccaactcggccgcagtattggaaaccacgctgctgtctgcgatggagaagctggggatctcggcatccaggctgggggtggcatttactggtgtgggtagggatgcgatcgcggcattcggtgcagttgctgagagcgcggtgtctaccagctcccagattgaagatgcattcaaagccgccctcggaaaagttgcaacgctggatgaggcgcgcacgctcggcgcgttgcttgaggctgcgggcagacaaggcaagatcggtttcgacgccgcagagcgatccgcagcggcattgaatgcgcggcttcgtgacatccaggtctcactggaccccttggcggacgagttcgccaggcttggcattcagtcgcagcagtcgctgaacgcggcacgggattccgcgaaggcggcgttcgaagctattcagcgcggtgcctcccaaggcaaagcaagtatcgaggacgtccgaagggcgttcgatgcatacgccaacgccgcgcgggctgcggtcgccgatagtgacgagtggaagcgaaagcaggtcgactcccagctagaggtgcagggttccgttctgcagaccggacagcacatgaaggggttgggcgccagtgggcaaaccgcaatgcagcaggtccagtctggcgctcaggccggcacccaagctatggggcagctgacgcagaaaaccgccgaggctggtggcgagatggatggccttggcaagagcgccgagcgcagcggccagcagcttcagaaggcgggtcaggcagcacagggcatggcattcagcatcggcgaggtgtccgaggccgcactaagcgccatgcgcaaccttagcgggccgaatccactgcagcagttcgcaaatgcgctgaacaaggtcacaagccaaaggaagcagctggccgaatacaagaaagagctggagggactggctaacgcgcaggatgaattctcgtctgccgcagccagtcgattggaggggcagtacgactaccttggaaagcaggaaatcgcagaggttgctgctctcgaagcccaggtggcgcggaagcgcgcggaagaggatcgagcggctgcagacgcgatggctgagcgtcgccggtcgattgaggcggcggctgaagcccaggccaagctcgacgctgagcgcattggcgagcggggcaagaacgagcaggtcctggtgattgactggaagtccccaagcaaagaggtcgtcgccggggcgaccgcagccgagcagcaacaagccgaacgcatcgcgaacatggttgcgccgctggtgcttcgtaaggtccagcagagccgatccgtgtctgtgcgagggaggcgctgatgacgcgcatcattctggggggcatcgaccttcctgccgatctccagtggaccgatgaattcaccgcctggcgtatcggccagcaagcgcgcacgagcttgaccggtgcgttgatcgttcaggaatcggcgcgacaggctggacgcccgatcaccttgaagacatcccgtgacgggactgcgtacgttggcgtggtgggcctcccgaccctcagagcccttcaggaaagcgaaagcgaagcgcgcctggcgcccatcaatctcatcatgcccgcgcacaacggcggggaccgccagtttcaggtccgctggcgccgaaccgatggcccagcgatcgaagttgagccgactcgcttcgcagtaccggcactggatgccgacctcttctctatcactcttcgccttatgacggtgtaacacatgacgatctccgctatcgatatcaagctgcgccagtcgcagcgactcaccgacaacccggacggtggtggccgaatggtgcaagccgagatcatcgacggcgccatgaacaatcttttccccgatatcggcgatgaagaacgcacaacggggcgaacaactctgcgcaagctgtttgtacacctggatacggctgcgccggacgtgctgaaggatgcgattggcgtgctcatcgacccgccgagtgaccctcgtgtgaccgtgagcatgttcgcgacagggtcgtatagcgatgttcggctggacgccaagaaccgcgtcgagagctacatcacacgtggcaccgagtccaggttcatcctgatgggcaaccatttcagcggccagatgacgatgctggtctataccacgtcagatgcgcccagccccgacatcaatgacaacttcagcctgttgaccctcgccggctccgggcatgatgaggcggagcagtatgttcgcgtgaaagctgtcctctccaggaccactcgcaccttcacggacgatcagggcgcattcgagcgcgatgttctcgtgatcgagttgatcaacccgctgctgcggaacttcttcggacaggaggtcgtgcgctacagcgcaacaaagccggccacccgcgtgtatgagacaaatgtggttgacgcgacgagctatcacagcgtcaagcgcctctcttcggctgccaagcctggcgacctctctgtggtggtggacacgccgtacgttccgattgtccccacttccacggccgagacgccggtgagcgacgttttggctggtatgggcaccatcagtcacgtgcagtccggcccggtcgggagcttgagccaaacattctcagcgagcttcaacgcgggcgtgccagtcaaccgctacctgggcaccggaatggccgttggcagcgtgaaggtcatggctgggagcgtcgagctggtggatgacggcagcggtggcctggtatctgcggccgtgactccctggggtggcagtgtcgactatcaatccggcgttatatcgatctcgcacgcgacgggcgctggattgaccagcctgagcatctccgcgacccccgccgggtctatctccgtccagggctacaccgacgagatcacggtgacccaaaacaaccaaggaatggtctggttgttgcagctgacccctcttccggcaccggggacggttaccgtcgactaccgggctctggggcgctgggtgaggctgagcgacaacgggaaggggcagctggtcggcaagcctggtcagggcggtggcacgatcaactacatgaccggctcggtcgtcctgacggcgggtgctttgccggacctgaagagcagcatcattggcgcgtggggcacggcagttgttgcagagcctcgtacgggcgattcggccattttgccgcccgcgctgcacttcacgttgggcgaggggaccgcagtccccggtagtgtccacatgaagcttcgcgtcggtggggctgatgtggaggtgaccgataacggcgtcggtggtctccttgttggggggcagctgcgcggctcgatcgcgtatgccaccggtgaagtgacgttgcgccccgccaccctgccggatgccgatagccaggtcgcggtcacatatgactggggccagcagctcaatgcggcgccacaaccggtgccggacggctccgggattgtctcctttgtgctgccgcaaggccctgtgcgaccgggatcggtgctgctggattgggtgatcagcgtgcgccgtgatcgcgacgacatctcatcagcgccgcaggcaatgcgcgcgatcgccaaggacgatggcaacggaaacctgcgggccgtctcggtgggcgatgcgagtgccgacacggtattgggctcggtgaactatgcgaccggggcggtaagcctgcaggctggaaagttcatggtccgccaggtgtcctacccgcagtacgagcttcagtccgggcggctgaaggtggtggggtacggccgcttggatgtgctcgctgagttttctgctggcaccatcatctcagtcgcttggctgctgtcgggcgactcctcccagcaagcgcaggagagcttgccgctgcccgcgatgcagctgcagctgacgcccaccatcagtgatagcgtcgttcctggtagcgtgcgcttcagcttccgtgggcggacatacgtggaccgcagcggcggcctgtatcacagcatcgaccctgccactggcgcgggtgtttacgcaggcacgatcgattacacgtcgggagtggtgaatctgtcgcagtgggtgccaggcggaagcaatcaggtccagatcctctccctgctgacccgcatcgctgacccgggcgttacgttcatcttcttccgcgccccgggctcccctctgcgaccgggcatgttcacgttgagggcgagccgcctcgacggtgagctgctgaccgcgacggctgatatcaatggtgatatcgccacctcccagatgcgggggacggtcgattgggagagcggtgtcgtcaaggtgcagttcggcgagctggtgcccgtagctggcaatgagggaatgccctggttcgaccccgcactggtggaaggggaccgcgtctggcggccggctctggtcctgcctggctcgatctacatgggagccgtggtctatcggtcaatccccctgtctgaggtggtgatcggcctctcatctgttcgccttcccagcgacggtcgtgttccagcgttcaagcccgggcagacggtcctgattcaccacacggcaaagcacagtgttgcggcgccccaggcgaatcaggtgctgagttttggccgggcgcgtatcgcagggctggaagtcagggacgcggctgggaagcccgtggatagcgcctggtacaccgctgaccttgatgcagggagcttgaccttcagcgatccgctcaacctttccgcatacacgctgccaatcgtagtgagcgagcgtgtcgaggaccgtcgtttggtggtccagccgcagatcacaggagaaattgaaatcaacactggcctgacccacgactacccagcaggcgaatccctcatcagtacggcgctgcggcttggcgaggcgaatggatcactggacctgcaggcgcgggtcgagagcctgttcgatcaggccgcgtggaccggagcctggagcaacattccgattggcagcccggctcctggcacctacaacgacacggacttccctctcgatgtgaccaacagcgacgccataacggagcgatgggccgttcggttcaccagctcgacgaactttgaagtcatgggggagacggtgggcgtgatcgccactgggagtactacaacggaccttgcgcccatcaaccctcgcaccaacaaggcgtacttcagcatgcgggctgctggctggggtggtggttggtcggtgaacaatgtcgtgcgcttcaataccgtgggcggcctggcaccggtgtggatggcgcggaccacgctacctggtacgccgacaggcgcaaccgactccacccggcttatggtggtgggcaacgtcgctggaggtgcccagtgacgctggtaccgatcgtctaccgcagcacagatccgggcgcgcccgttcttaatgggcaggcgggatctctgcttgccttgctcaacgcaatcctggtgacgggttacggggacggtgcgtcgtcaaagcctggtgcaggttggactcggccctacgctagttcatccgtccaggtatttcggaacagcgcgacaaccggctctggcacctatttgcgagtgcgcgacgacgcctcggctgcaacgttgagcacggggtgtgtggcacaggtcctggcctacagttcgatgactgacatcgacaccggtgcggatcagaccccaagcgctgcgctgcaggcgcgtggctctttcattgcgaaggcgccaacggcaactgcggccgctcgcagttggatggcaattgcgacggagattggcttctaccttttcactgcatggagcaatttcaacaacggactcggagcgtactactacggcgacattgatactgtcgtctcgggcgacgtctttccattcgtgatgtttggttccaatgatatgacctcgttctccggtgcgtggaacactgatgcatgctcgttgttcttcgcatcggcattgggagttgcggttgacggcgtaactaagcgcgatgggtcgtatgtgcccggcgggttcgtaatgcgcagctacatcggtgggcaaaatgcacctggtcgtgttgctaccactggcatcgaccctgctgccggcaactcgaataaccgttcctatgggtccggatcgtacccagtaggcccggaccgtgcgcatggggggtacaactacatgcgcgctgcggtacgcgaagcgccgttcgccttgcgcggtcacttgcctggtgtcttggtcccgctgcacgcgcgcccgcatgccgaaggcagcgtggtgccgttcattgagggtatcggcctgggtcaatggctggcagtcaactacaacgtggtagagccagacgttgccgatcgcaatggacaggtgctcttccgtttggatgcaccctggcgatgatcgttggcaccttctatcgcagttggggcccgcgaggcggggatggcttcctcggagggactgcgcctgacggggataacgacggccgcgcgaagatcatgaatgtaccgcgtcgtgtgtacatccaggtctatgtgatgcgcgacgctgtagacgtccagtacgtcgcttcagtgctgagcggtcaagacggtgtgtggcgccttcagggcatcgaccgaacgcggaagtaccgcgtgattggtacggacttggctgcgggggtcaactcggccatccaagactgggtagtgccggcaaagatggagccgtgatgtcagggggcggtgcattcgttcggctcaaccttggcccgcgattcggtggtgcgggtgggttcacgccactaaatctcggtgtcgactgggatgagaatcctgttgagcccgtagtgcggggcctgtcgctcgccgtctctatcgcctggcgggaggctggtcgggcgaggtgttccactagggtgggatggggcacgtcgagttcgctgcgttgttcgtgcttagtgccatgggagggcactaagcgggtggatggttccacgtcagttgcgtggggcgtcgccccccccatggctggcgaagcggggtttcggtggcggaacgcggctctcgttggcgagagcgttgggttgccgtggggtgggttgccgcaggcgtcgcgattcctgctggctggttggcgaggcaggctcgacgttaccgggatcactgctcgtatcgcgtggatgcgaggcttgcctgtccacgcgaagcaggggctgccgtggcagggagcacccagaacggcaagcgatagctggtccgatagctggaagcacctcggcgcagccaggcgtcatggtcgcctgccttggggctctgcgaggccgttgccctgggtcatccgccctccggtaaagcctgaccctgatccagatccagagccgggcgttccgccaggtcattccgtttcgctgaacttgggttgctcggtggtgggcgtccccggtcttgcacccctcaaccttggaaccaccgcgtgctacgtggtgcgaccgcaacgcaggacgtatgtcgtgatcaatgaagtttcgtttgtacggctccctgatcggacgcccatcgaggtgtcgaggatctcgctcagtgcgagcaggagcgcctgggggtggaccttcgacgttgagctggccgacccaacgcaactgtcgctgctgaagccaacggcggctggcccgcgccagtttgaggtatctctcaatggacatgtgtggactggcatcatcgagagcttccagaagcagcgagagtttgccgatgggggagtccggcttagcggcaggtcgcggacggcgctgcttgcggcgccgtacgcgccggcaagggtcaaggtcgctaacgaggacaggagcatggcccagctggtggccgaagagctggccgataccggattcaccagccagtacgagacggttgattggacggtgcctgctggtgcttggttctatgacgccagcacgccccttgatgcgatcagtgcactggccgaggcgagcggggcggttgttcaatctcatccgcaagacctctcgcttcacgtccgcgcgagctacccagtcagcccatggctctggcgcgacacccagccagcccatgttgtgcaagaagacatcgtgctgactgagagcttgcagatgcggagcgcgccactgtatgacgccgtcgtggtgactggcgagatttcggggaaaggagtcacctgcaaggtgcgtaaagctggtgaggcagggcagctttacgcacagcaagtgagcagcccgctgatcagcgtcgctgcggcgggtgctgagcgaggacgcaacgttctgagcgatcgcggtgagcaggcagccgtggacctgacggttcccctcttcccgaggccgctgaaggcgggggaagtgggtgccatcatgcctttggatctggtggaggtcgttgctgctgaaggcacttggcacgggcaatgcgagtccttgcgcatcgaggttgtgatcgatcagcaggccgttgtgattgaacagacagccactctggaaaggcactacaccgatgcggactgacctctgggatcaattcggcgagctggtgaccagcagcccccgattgctggcgaccgtcactgcgcacaacagtgacggaaccagcacgctgaccacttatgacggagtacagatgcgggcctttggtcagctccagttacccatcccgtacaacgtgtgggtccggggtgggcgcctggttgaggccgcgcccaacctgccgttggtggaattagtggtttaacgaaacagggtgctgcccaaatgcctgcaggcacccgggcagtggtggaggctggcttcggcgcctagattccctagctcctggcgtcgaagaacactgcctgatcgaaatctgccccgaagtgatcgatgaaggttgcaaggagattgccactcagttccttgaatgcgagttttctctcggcggtagtggcgtttttgtagtacttgacgtagaagctcagggatgacggagcgacattcgtcacgtgcgcgacaagatagcctttgccagcaatttgatcagcgacatgcgtgaagtccccgtcgctgtcttccttccaggtggaaattccgcctgatttgtttccgagggctattttggatttgaactggtttagaagcttgcttgggttgctgcattcgaagcgaatcgccatctctttcccctgtgtagttcggaatgaaccgcaattcaacatgcgggtcattcatcattgcgcaaggacgcgtgggaatctagccgcgtctatgtctttggcccagcgcttgattgcttcggagaccgtagctcctttcaggcgccgccgagagtggctaagcagttcgatctggcgcgagttcagtcaggtgcattccgcgttcgcaggatatgcgaccgacgccccgtatgctccacggcgagcctcccttgcacggttaccagggctttcgcaccgatccggtcccgctggctgggttcagatgggggcacttcatacgggcggagcccgtctgatcaggccattgatacgttaggcagtactccaccggagaacagcgttgtatagttgccgttcatggaccacaggggtacaggatgtcgaagttcagtttgaggttttatcgggttgcacattgcggttactacaagcacggacagccggatcccgctatcggcgatcttgattttttccttgaagaactgcgtgaatatgccgctgggaagaacttggaagatacgagggttgaaggcggtggtgatcggctgccggcctatctgtttgacatcaaacagcatggtagttgctggatactaacgctttggaatgaggtgccggctgatgaaggtgccgttgcctccgtgccggcgtcgtcgcctgtcggcgctggaacggtgctttcaaatccggtggctgcgaatagcataccaggcttccccacttatttccttttcgttcccgaggcggagctcgtggcgccggtagtttacggcgattcggtgtttggtctccctcagtttaagcaatacgctcatcagttcctggaaaattcgaccagcgtcgttcatttcgacgaggatggggatgaggcggaagtgctagggtacgaagatagtgatggggaggttcgtgaggatctgcgcgccagatttgagatccagcttaagcgtagcggtacgcaagaggcagctattatcaaaaaggccgcatcaatcagatcgatcattagagtggctgagatgaagactgtcacgcagccagagagggctcgattccagaggttcttggatttctggggcatgacggctgcccctgcagcgaagacagtccgcattcgccagcaaatccctgtgtcggtcactaaagaccaggtgaaggcaatgatcgatgacctgtctgagaatctcgtgccaaagagaaacgacattgcatttaagtttgagaaggaggcacagccggtgtggttaagtgggagtattgcgtctgccagctatgatcttaatgtcgataaggtggatggtgttttctccgctgaagatcttgcgagagcattttcgcggagaaaaggtgcgctaattggtgatgcaggataatgaagacttggcaaaaggtatttctggtgttggtctggattgccgtgcttagtggtgcggtggttcagggcggatcggtctcttttgcccaacagtggccgctgtacgaggcgttaaggaatacggcggccatcatttttgcggtcgtgggtgcatggttggcgatcgtctatccagagcgattgcgaatgtcgcagggcaggccggggactgctgagcctaagaatgcggagaagatcactaagctgctcgagccaattgtaaactcgaccgtgattcttgcggttgtgctgattgtggggttgattgcgcctctgattaagggggttccttttgttagggcgcatgtggaggtttttcgaactatttcctttgttattcttgcgtcgttgacattgcttcagatttgtacggttgtattgacgctcattccggcgagtgatgtgcgacagcaggtgttggaggaaaaggcggtgaaagatacatttggttcgattttctcacgcgggaagaagaggggcgggtagcgtccggcttgttgggtgggcgggatgaggatattgcccgccgaaattgtggcggttactccgtagtggctgagccactccggatgtgctctatggatacatctgacgaaaaagggcctcctaatggaggccctttttcatgcgttggtggtggcaggtgatcagtatttgattttgcagttctcgcagagcgaaacaccagctggaaccagagtgtcgcaggggccgccgcacttttcgaccaaagaaggacgaatgtgcctttcgtaaaccccaagctgcttgggggtcagggattcgagcccctggcctctcacctttttcaggacgcctgcagctaccttattgagcatacctgcttcgtccaagttcttatacgcaagctcacgctcgtcgtcggcaaggttccgttctgccgtcttccatctatcagtggtcatgcttggcccccttgatctttgaccgcgcttagtttagcagggcgcagctttacaaatgcttcggtcctagctatccggatgggtggcaataagggtggcgcccttatctaagtgactgatcacattgggttcggcttgaacgccgagtgcgtttacgtgagtctgagcaggaaagacggcaaatcgacgccgggacgactccttgcattacacgatcaagttggcctgctgctgacccagtctgtctagcctagctttggctccgaagccgatgggacgagtatgtgcgtcgcctagaggcgtcacttgatcgcgaagtggtgccggaggcgctatcaacaccaaggcggcgaagaacttgggtacccggggcgctggtgtgctgtcaggctctacccagaattgcgcctgcgcacggctgtggaccgccccctggatgccacaccggccggaaaggcttgacccgctgcccggactgccgccgtccctcgtggagcagcaacaggccccgcgcttggctgaggccggggccagagaggtggcgcagatcaaggaagtgctggaaccgcgccgacagccggccttgaccgaacccaggacgcaggacccgaagaagacatgggtaagggcaggagcagtttagggccactggagcgaatggcgcgggcgggaaccgtgttggatgttagtaattttgctaaaatgcaccctgatgatccaggtcggttgtggcgacaacaaaaaggagttaaattcgcctcaacgacaagagggtattgccttgagcgccaatggacacgaaaacattgccgaattgttgtcgtctcagcttgatcgcggtctgctgctcgacctgcagcgattggtattgcgagcgctcgaggaggccgtggaggccagtgctcgctttgctatgggtcataggccgacggcggagggccttttgaggcatttgatcctgaacgaagcgatggagagggggctggctgaagcggaagtcccgcggaccccgcttaggggcaacgcgatcatggttggtcaggtcgggatcgtcacccttggccgtgtgcacatggggaatggcaagtggaataacgccaagcgcagcaaaggcaaagtgaagctgtgccgcaacaatgacgtcgttcgccgtttggttaagcctgacctttttagtgatgttcgggttgcagatgttcgcgaagtagctgtcttccttgtgacggaggctgggcaaggtgacgcggatgcccgaatctatctggtagttcctgatgaaaccatggaccttaagaactgcgtattcaaggaagagatgtctttgttcttgcagcggtacgcaaaacccagtgatgtcgaggatagggtcggaccgaagctcaagagcgggatcaagaaaaagcgggacggcgatgaagatgagccaatgagatgacacgttctatccaaaattttgttccagagcggctaacgcaagcgttggccgctcgcggtttttctgccacagaattggcggcgcgagtaggagttaccaacaccaccatcagcaggtggcgtaatgctgtacaggtcccttctggagccatgcttgaagcgatcgcgtcggagctgagagtgacggcggagtggttgacccgccccatccggccggcgacctcacgcccgtgctataggggaagtattgcccaattgaagcaagatcgggcgctgttgggcgcccgcatgtcgtggcttgaggagctctcctcgcagctcgaggactacgttgactatcccgaagtctgtgttcctgatatgggaggcatgaggctttctgatatcaccaacgcggttattgaagaggcggcggagcgctgtcgccgtgcgtggggtatgggcgaaggcccggcgggcgacattctgctgcttctagagaatgctggcgtggtcgtagcaagggaagagacgggcgtcgctcgtatcgagggcctttccgcctggagctctctgggtcgtcctttcgtactcctgtgcgcggataagggaaatgcgttcagaagtaggttcgacgctgcgcacgagctcggacatctgatacttcacaggggtattgacgcgccgggcgatgcgacaacgcataagctgatggaaggccatgcgcaccgattcgcaggggcatttctgcttccagcgaagggcttttcggccgaagtcaacacgccagtcaccttgaacgggttgctcttcctcaaacagcggtggggcgtgtccgtcggcgcgatgatcatgaggctacgaaatttgcagatcattggcgaagaggactatctgcgtttgattaagcaccggtctgcgaaatggggccaacgcagcgagcctggtgatgatgatcgagaacccgaacagcctcgccttctgcgtcgaacgatggagctcttggcgaacgaaggtgttgttgtgccagaagcgctgcctgaccttgtgggtctctctgggcgcgatgttgaaagtttgatggggctgccattcggtcatctgtctggtcgcaaagccgacattgtggagctgtcactcaagccgcgcgaacgggtccgggaggagcgggaatccaatctcggcccctctgcagagatcctgccgtttggcaggagggggcgcgagaagtagccttgcggtggcgttttgggtggcaggtgcatgtaagtgtctgcttttatttgggttgatgcggattgcaaatccgtttacagcggttcgattccgcttgaggcctccaattgaaaagccctgactccggtcagggcttttttgttggctacgattgctttcccgcttgcgcgatcgttgcgcggcctggcggccagtcatggcggatccggtggcgctacactggtctgatgaaccagattgatcacttccgcggcgccttgctcggcctcgcgtgcggcgatgccgtcggtaccacgctggagttcaagcctcgtggcagcttcaccccgatcaccgacatggtgggtggtgggccgttccagctgcagccggggcaatggaccgacgatacctccatggcgatgtgcctggccgagagcctggtgcgttgtgacaccttcgatgtgcacgatcagatgaaccgctacgccaactggtaccggcatgggtactggagtgcgaccggcgagtgcttcgatatcggtatggcaacgcgggctgcgatcgaccggttcctgcaggatggccatccgctggcgggtagtgacgacccacgcagcgctggcaatggctcgatcatgcgtttggcgccggtggcattgcgctacgccgggacccccgacctgcaggcaatggccgagctgagttcgcgaacgacgcacgctgcgcaggagtgcctggaggcgtgccgcttgctggcggtcgcgctggagcgggcgttggcaggtggcacccgtgacgcggtgctggatctcagcaatgtccccgttgagagcgcgcggctgcagcagatcgcggcgggcggctaccgcggtgccgcgcgtgagcagatccgtggcaatggctatgttgtcgacagtgtcgaagctgcactctggtgctttgatcgccacgacacctttgaagccgtcgtactcgaggcggccaatcttggcgaggacgccgacaccacggccgccatcgcggggcagctggcgggcgcattccatggtgcgcgcggaatccccgggcggtggttgcagcggctggccctgcgtgccgaaatccaggcgctggccgatgcgctgcacgccttgaaccagggcagcgaccgcgctgcgtgagtcgggttccctgcctgtgaactgcgccggcaggacgctccctgccgtcgccatttccgacgccgcgagggaacccgtgcggcagctcgcatgccgcggccgccagtctcagccacccacgacatggaaaggcgctatggtcgggttccacgtctcagggagccgcaatggcgagcaaggacatcacgcgtcgcttcagccacggagcgaaacggaaatgagcaaagtcatggcagatgtgcgttggctgacctttcgcttgaagaacgggcaatccatcgggccggagcggctgaaggacggatgggtgattgcctcggaaaccgcccgctgcgaggtccgccgcgagcatatcgagggatcgggcctggtgtatgcgctgtatgcgccggccagcctggcctcaccgcggcgcgcggaaatgcgcatgcgcgaattcctgatgagctcgggctacaccttcacgatgggcacgctgggcggctgactgggcccgtcatggttgcgctcgcacggtcagcgcctggccctgcatgccgatcgggcggcgtgcatcgtgcagcaccatgccggtcaggccgaggccttggcggctgaacgacacacgccacccgagcagcccccttccggcacggtggtgatgcgttgcggcacgcgacggactcagcgttgcacggccttcaaggcgtcgaccacctgtgccccagaaaaaccacagtgtccttcgcccactggcggcaacacgcgtggcagcgggcgtgcgccagcccgtgcggccaattgcggatacaccgtctgcatgtgcggcacgatggtcgggtcgttgtggttgaactggatcaccagcggtcgcttcagtgcgccggtcattgccagcgcgtcgcggacatgcgcctgtgccgcaggcacgggatcgatgcgctgaacgccggcattgaatgcggcgtcgtcaccgaatccgctgtacaccacccccaggttgccgaccggcatgccgccgctgcgcgtggccagttcgtgcagcaccagtgcgtgcaggctgatggcgccggccagtgcatcaggggacacctgcagctgccgcgccagcactgcggcgtgcgacggatcacgttgcagggcattggcgatgccctggtacaactcgccctgtggcagcgcggcggcttcgcgcgctaccaggccggcggccggcagcccatcggccttggggaagaagtaatcgaatgcgaccagcgtggtcagcagatcggtcgcgatctgttcgccaccgagattggcgccgcacagcgacacgccacctgcgtagtgctgcgggaagcgctcgaggctgccgatggtcacggcgccgcccatcgagaatccgagcatccaggtgtgacggacatgcttgagttcacccactgcctgctggcgcaggcgttccgtatcggtgatcgcatcggccaccgcccagccctggctggcataggcgctctgcgcgacggcgtaacctgctgccagcagtggcgcggtgctgtcattggccgacatgggtgcggtgcgtggcatgccgaccggttcgtagccatgggccagcatcaccagatcgccgttccagctggccggaacatccagccgccacggtgcgccctgcagctcgccgctgagcgtgcgcggtgccggcggtggtgcagccagcgatgccatccaaggcagcaggcagagggcaagcgcacatcgaaacaagggtcgcatcggggtcattccatgcgggaatggcgccgagcatagatccctgcacaaccttgcgcgcgctgcagtgccgcagggcattgccggtcggcggtgccgcgctctacgctggcggcatggccctgcacagcatcgcgtcgattatccgcattccccacgggaaggcggggtagcgcgcggtcatctcggccaagcaacctgcccgggaaggcgggttgcatgcagcgctctcccgggtaatgaatccaccaaggagaatgcagatgcacgacctttcatcgaacgacgctgcgccgaccctgcacctggtgtgcggcaagatcggtgccggcaaatccaccctgtcgcagcagctggcgttgaagccgcgccacgtattgatcagtgaggacacttggctggcggcgctgtatccgggcgaaatccattccattgccgactatctgcagcgtgcagccacgttgcgcaatgtgctggccgatcatctgcgcgcattgctgcaggccggtgtttcggtggtgctcgattttccattcaatacgccagccagccgcgcgtgggcacgtgaagtgttctcgccggttggcgctgcacatcaactgcatttcctcgacattgccgatgaggtctgcaaggcgcggctgcgcgcgcgcaatgctctcggcgaacatccgttccaggccagcgacgaggagttcgaacgtatcacccgccacttcgttgcaccggccgcggaagagcgcttcgtggtgatgcgctataccgaggcaggcccggcgtagcgcagcaccaggcggccgtcgtcatgctggcgcagctgcatgaattcgagacggatcactcagccagtgccgccccctcaaccgccgattccgatacgatctgtcacattgagttagtctcgcttgatccggagtcccgtcatggtcgaccgtctcgccattctgctggaacgtttttcggtcaccgcctcggtgttccatgccggcgcgctgtgcggcatcaacacgctggagggcgaggatgaagccgggcagttgcacctggtgcgacgtggcccgctgcaggtcagccacggccagcagaccgtgcaggtcgaggtgccgagcctgctgctgtacccgcggccgatgccgcatcggttcagcaccgatccgcagcacggcgccgacatggcctgcgccaacctgcatttcgagggcggacggctcaacccgatcagcgccgcattgcccgatttcatctgcctgccgctggccgatctgtacggcggcaacgcagcgctggaactgctgttcgaggaagccttcgagcagcgctgcgggcgtgcggcgatggtcaaccggctgttcgaggtggtgatgatccaggtgttgcggcagctgatggaaggtggcgaaatgcgtggtggcctgtttgccgggctgggtcatccgcggctgcggctggcgctggtggcgatgcatgaagcgcccgcacagtcctggaccctggaagacctggccgaggtcgccggcatgtcacgcagcgtgtttgctgccagtttccgtgaggcgatgggcaccacgcccggtcaatacctgcagggctggcgggtgggcctggcgcagcaggcactgcgccagggcagaccgctcaagcggattgccgacgatgtggggtacggcagcgaagccgcgctgtcgcgcgcattcaaggcgcacaccgggcagtcgccgcgcgagtggcgcgggcaggcccgcgccggcgcggcctgagtctcagcccagcaccagccgggccagtttcatgccaccgaacaggccgaccaggcccagtgccaccgaaccgccggcgtacaacgctgccaggccgtgctggccgcgctgcagcagcacgccgatttccagcgcataggtggagaacgtggtgtagccgccgagaacgccggtggccagcagcaggcgcagctgcggcgaggcgccattgcgcagggcgaaggcttcgaccagcacgcccatcagcagcgcgccgctgatgttgatcaggaaggtcgaccatggccacgggctgccgactgcaacccgcgtaccgatcaggttgcaggcatggcgaaggcaggcgccgagcccgccgccgatgaagaccagcaagtagttgttcaatgcgtgcatcacgtgcctcgggtacgggttcgctgattcgatggcgaacgccgagggcaggcacggcctgccatcgacgaacgccggttcgtcctggcaggagccatcagccctttcaggcggttatcgggggagccccatccccatcggcgaccatgctaccagcggtagtgcattcacgtcatcgaggtcgtcagcacccggatgaccttgctgcggctgaagccgtccatcagcagttcgaaggccagcaggtccagggccgcgtggcggcggtggtcgatctccaggcccttctcttccaccagatggctgaccagttcgtaggcgtcctgccagacatccaggtgggcctggctggggatataggtattgccccgctcaccgacgccaagcccgctcacgccatacagcagttcacgcgcgtccagcttggccgcatcggcgatgcggaacagctgttcggccttcacatgggcggggctgacgtggtcgttgagccagttgctgatggttgccgtcgtcgaatcggcggcgcgggccagatcggccgggcgagggtgcccggctttcttcatggcaatggcgagtcgttggccgagagtattcatctatgcaagccagcttaacgcgtggatcgcaaagatcccttgttccaagaataagtctggttaacagaaggaccgaccgtgaccgaattctggagcaaggggcaggtgcgcacccggctgggtttccgcaccgatgccgaactggcgcgcttctttggcataagccgatctgcagtgtcgcaatggcccaaggatttcccgattcctgcgttacgccaatacatcctgcatcagcgctatcccaacctgttcccggcaactgaagccacgcagggcgaataagcctcaactgcgccgccttttgtcgcatatagcactctaagtgccatttgctaagtatgcttagcaacataggaaacttcgatggaacggggtcgggctatcgatgaggcctaccagggcagaggctggaggaatcgggtaggttgtcggctccggcccatccgggaagcctgtcatcccgtatgtggtttcgtgaacgattaataatttcgatcacgaaagtcgctgcatgtaattgacctgtcgtgaaatctatgactaattggcatcaaccgggcgtgaagcccgggagtctttcagtagctcgcaagtgagtcggtagaccgtcaacgatgcagaacaagtccaacggaggtcgtatggaatacggcatgcatggcttggctgaacgggtacgccgcgaactggaagccagttatcacaaacacggatgcggtccggcgttctgggatacctaccagcaggtgctggaccgcctggtcccgcaggggaccgagcgtaccgaagtcaccaatgaaatggcgctgatcatcgaacagctcggcatcgtccgacgtgcgcagctggtgccgccgcacgccaacgggccgtgttgacccgttgattcaaagcaggcgccaggcgccacaggccaacagcgccagcagcatcgacagcagtgccagggtccgcggtcgccaccattgccgcggttgcccggccatggcctgcgggctgcagtagcgcaccagccccgggccgaaaccggcctggtgctgctgccgcgagcaggcgtccaggcaggcgccgcaggccaggcaatcggcctgcggtccctggcggatgtccagctgcatcgggcaggcgctgacacacgcggcgcagtcggtgcagtcgcccaggcgatcggcgctgaaggtgggcatcggtccggccagcagcggatgtgcggcgcggaacacgtagtcctgtgcggtggtcgggtcgagcaggccgcgtccgcgtccgagcacgccccccatgcccggagggcgcatgccgcgcggttcgccgcggcgcgcgtcgtacagcatgcttggtgtatgtggatcgatcagcagtggttgcatgcgcgcgaacgggcacagcgaacggcacacctgctcgcgcaggaagccggcattgccccaggtggcggcggcatagaacagcacccagaatgtttcccagccgctccagccggcatgcggagcggcggccagcagtccggcgatcgggctgaacaggccgacgaaggtgatgccagtccacagcgacagcaacccccaggcgacctgggtggccgggcgcacggctggcactggcaagaccttggccatgccgtgcgcgatccagtcgaaggcacgacgccacagcgtctgcgggcaggcatgaccgcaccagatgcggccggcgaggtgggtgagcagcgcaaggcccaccgccagcaccgccagcaacccgatcagcacgccgacatcgccgggccacaacgtccagccgaacaggtcgaagcgccgtgcgttgatgtccagcagcagagcctggtgtccattccagcgcagccatggcagggcatagaacagaatcagcaagagcgcgctgagcgcgccgcgccaacgccaggggcgtgggattccggttccggtacagggcgtactcatcccagcggcagctcgtcgtcgtcatcgctcggcaggggccgctgcaggtaccaggtgactgcgctggaaagtgcggtcaccgaccagaacatgaagaatcctgccgtatagcccagttcacggctgatcgccgtgcccgggaagctgatcgcctgcaaccgcagcgggtcgacgaaggcgaagaacaccacgctggccaggctggcagcgatgaagctgggccagaggatggcgccccagtgctggatcagctgttggcggcggctgggagaaggtctgttcatgctgtcccggatcggaatgagggcggcgcgtatactccgccgaggccggcgcagcatccgcagggcatgcttcctgcaatcgtggcagcctaggtgcagcggactgcgccgacattgatctggatcaacggcggtgccggccggctgcggcacactgccggcacgctttgggtaccccgatgaacgcaataccgccacctgtcctgcccgtcgcctcgcccgggctgtgcaccgagcaggaagtgacccgcctggtccacgacttctatgcgcgcgtgcgcgaggaagagcggttggggccggtgttccaggcgcatgtccacgactggccggaacatctggcgcagctggtcgatttctggtcggcgatgctgcgcggcacgcgccgcttcaagggctcgccgatgtccaagcacatggccatcgagctggacaaggacttgttcgatcgctggctggtgctgttccggatcaccaccgccgagtgcggcaacccgccgatgcaggagctggccaacgacgtcgccgcgcgcatcggtgacaccttctggaagcgctaccagatgctgcgctggccgcaggtgggcctgccggtgctgggaatccccacccgcgattgatctgggtcaaggcggtcatggccgtccggcgcgatgctggcggcatggacacgttctctcccgccgccggtggcctggcctggaccttcgaccccgacctgctgcgccggcatgaccggccggggccgcgctacacctcgtatccgaccgcgccgcacttccacgatggcttcgacgcgccggcgctgcgccaggcgatcgccgacagcaaccagctggcgcgcgcgctgtcgctgtacgtgcatgtgccgttctgctccagcccctgcttctactgcggctgcaaccgggtgatcacccgcgaccgcggtcggggccacagctacgtcgcgcgcgtgctggccgaggccgacctgctggcgccgcagttcgaggacggccgtgaggtcatccagctgcatctgggcggtggtacgccgaacttcctcgaggccgaggcgatgaccacgctggtggaggggctgcgccggcgcttcgatttcagcgattcgccgcagcgcgatttctcgatcgaactcgatccgcgcttcatcgatacccgcgatgtcgccatgctggcgcggctgggcttcaaccgggccagcctgggcgtgcaggatttcgatccgcatgtgcaggaatcgatcaaccgcatacagggcgtgcagcagacgctggacatcctgcatgcctgccgcgacagcggcatgcgctctgtcaacgtcgacctgatctatgggctgcctggacagagcctgcagggattcggccgcaccctggaacgagtgctggcattgcgaccggatcgcctggcggtgtatggctacgcacacctgccacacctgttccgcgcgcagaagcagatcgacgagcgccggttgccttcaccggaagacaagctggcgctgttgggcctggcggtggagaagctttctgctgcgggttaccagtacatcggcatggatcacttcgcgctgccggaagaggacctgtcgcgcgcgcagcgtgccggccagctgcatcgcaacttcatgggctataccacccacgccgataccgacctgctcggcctgggcgtgagtgcgatcagtcatatcggtgccacctacagccagaatccgcgtgacctgccgtcgtgggaggacgcggtggaccagggccagctgccggtctggcgcggcgtggcactgagcgccgacgaccagctgcgcgctgaactcatccagcagctgatgtgccagggcgaggtggacggtgccgtgctgggccagcgccatggcgtcgatttcgagcagtacttcgccgaggacctgcgttcggtgcagcggttgcaggaagacggcctggccgaataccgcgacggtgtagtgcgcgccagcgagccgggtcggccgctgctgcggctgctggcgatgtgtttcgacccctacctgcgcgcggcgcatgaacagccgcgttactcgcgtgcaatctaaggtgtactcgcgcagcgcggttggtgcccggagccggaatcgaaccggcatggggttgcccccggcggattttaagtccgatgcgtctaccagtttcgccatccgggcctgcagcgcggcgccgattgtagcccagctgcagaatcgcagccggattgccgtggggcggcagcgtgtttaactgtcgctcccattcatgtcatagtcccaaccatcgttcccagggggggagccgcacgatgtcgctgcacgcgattgcctatgccagtgaggcccgcgccgatctgcagacaaccgatcttgaccgcctgctggccgatgccacggcattcaaccgtgtagccggtgtcaccggtgtgctgatgttcgatggcagccgtttcctgcagtacctggaaggcccggaggacggtatcgattcggtgtaccagcgcatcgtcaatgcgcgcagccacggccagctgaaggtgctgtgccgcgcgccggtggcgcagcgggcgtttccgcgctggtcgatgggaacccggcgcattgatgcggagctgctggcacagatcgttgaatcggcgtggccgggcttcctgcttggcagcggtggcttcgagcgcctgcggcaggcctggaccggcgccgatggcgaactggaaccggccgcagtcgcactgggctcctgatcccatcttggcgggcaggcgcccgggccgttacgctgtcgcctttctggcgtggaattacacggagtggtgcagcgaatgagcaggtcggccgaatccatggcggcatgcatgccgttgcgcgggacatgccagtgagcgcgtcccttgcggcagcggagaccccgcgttttgcggtgatcggcttgggctacgtcggcctgccgttggcggtggccttcggtcggcactggccgacgctgggcttcgacatcgatgccgatcgcatcgccgagctgcgcgatggccaggaccatacgctggaggtggaggccgacgagctggccagtgctcggcagctgcagtacggcagcgatccggccttgcttgatgcatgcaacgtctacatcgtcaccgtgccgacgccgatcgatgcctatgagcagcccgatctggagccgttgcgttcggcgacgcggctgatcgccagccatctgcgcgcgggtgacctggtgatctacgaatccacggtgtaccccggcaccactgaagaagtctgcgtgccgctgctggaagaaggctcgggcctgcgcttcaacgaagacttctactgcggctacagcccggagcgggtcagtcccggtgaccgccagcggcgcctggccgacatccgcaagatcacctcggggtcgacagcggaagtggctgcggtgatcgatggcctgtaccagcgcatcattgccgccggcacgttccccgcgccatcgatgcgcgtggccgaggcggccaaggtggtcgagaacatccagcgcgatgtgaacatcgcgctggtcaatgagttggcgctgatcttcgacaggctgggcatcgatacccaggatgtgctcgatgccgccggcagcaagtggaacttcctgccattccggccgggcctggtcggcggccattgcatcggcgtggacccgtattacctgctgcacaagtccgagagcgtgggctaccacccggacctgatccacaccgcgcggcaggtcaacaaccgcgtcggtgagcatgtggcgtcgcgggtgctggcgatgctggccgaacgcggccgcgaaccagtgcagtcgcgcatcctggtgctcggtgtgaccttcaaggaggattgcccggacctgcgcaacagccgcgcgctggagctggcgcagcgcctgcgtgatgccggcgctcaggtcgaggtcagtgatccctgggtcggcccggcggcattggccgatgagggcgtgcagtggctggccgaacccgtggcaggggcctatgacgcggtggtgctggcggttgcccatgcccgcttcaaggcgatggacgaggccggtatccggtcgctgctggcgccgggcggcctggtctacgacgtcaaatcggcctggccacgcaacgtggttgacgatcgcctgtaaacccgggcggcgggcagcacggtagactcgcaggcagttgcaaccaaggaacgccatgcaccggtatatcgtctacctgctcgccatcctgatgttccccatctgcctgtggttggccacgatctggccggcctggtactggggcgtcggcctgaccgccgcgatggtggcactggggacctgggacctgctgcagaagcgcagcacgctgcgccgcaactatccggtgatggcgcacttccgctacggcctggaatcgatcggtccggaaatccgccagtacttcgtgcagagcgacctggaggacgtgccgttctcgcgccagcagcgtgcactgatctaccagcgggccaagaacgagatggacacggtgccgttcggcaccctgcgcagcacctacgcggtggattacgagtggatcaaccactcgctggcgccgaccgccatcgccaagcacgatttccgcgtgctgatcggcgccaattgtgcaaagccgtattcggcgagcgtgttcaatatttcggcgatgagcttcggctcgctgtcggccaacgcgatccgcgcactgaacgaaggcgcgcggcgtggtggcttctaccacgacaccggtgaaggttcgatttcgccataccaccgcgagatgggcggcgatctggtgtgggagatcggctcgggctacttcggttgccgtgacgaaaagggcggtttcagtgaagagcgcttcgtcgccaacgccacccatgatcaggtcaggatgatcgagatcaagctgtcgcagggcgccaagcccggtcatggcggcgtgctgccggcgccaaaggtgaccgctgagatctcggtcacccgtggcgtgccgatgggcgtggactgcgtatcgccgtcgcgtcactcggcgttctcgacgccggtcgaactgctgcagttcgtcgcccgtctgcgcgaactgtccggcggcaagccggtcggtttcaagctggccatcggccacccgtgggagtggttcggcattgccaaggcgatgcaggaaaccggcctgctgccggacttcatcgtggtcgacggtgccgaaggcggtactggcgcagcaccggcggagttcgtcgaccatgtcggcgtgccgatgcacgaagcactgctgctggtgcacaacacgctggtcggcctggaccttcgcgagcggatccgcatcggcgcggcgggcaagatcaccagcgctttcgacatcgcgcgcaccatcgcgctgggtgccgactggtgcaatgccggccgtggcttcatgttcgcgctgggctgcatccagtcgctgagctgccacaccgacaagtgcccgaccggcatcgccacccaggaccgggcgcgctggaagcacctggatgcaccggacaaggccacccgggtgtacagctaccacgagcacacgctgcacgccctgaaggagctgttgtgtgcggccggcctgaacgatccggccgaactggggccggagcacatcctgcgtcgtgtttcgcctgtcgagatccgctcgctggcgtcgctgtaccgctacctggaaccgggcgagctgctgcacaaggtgccggatcatgcggtgttccatgcattctgggccgatgcacgcagcgattcgttccagccgccgccgaagatccaggcgctgcgcgccagcaagtcgcgataatgtgttgctgtagagccgagcccatgctcggctgcttctctcatcgcgatgttggaacgaagaacagctgagccgagcatgggctcggccctacagggggatgtcatgcggttcaggaccggcaccatcgacgatgtcgccatgctgtgggcactgcgcacgcgttgcgttcgcgagtcgtgcagcagccattacccggcggaggtgatcgatccgtggtctgcttcgccgccgccgtcgcagtacgcacggctgctggggcagggaggctgcgtggtggccgaggacgggcagggtgtcctgctcgggttcggcgtgtttgataccgacgccaatgaagtcgatgcgctgttcgtcgatccggatcgtggcggcacgggcatcggccaggcgctgatgcagcgtctgctggcgatggccgatcgtgagcgcgaggtggtgctgtcagcctcgctcaatgcggtgccgttctaccaacggcagggattcattgccgtgcgggaggaagcctacccgcatcccagcggcgtggcgctggcttcggtgagcatgcgcaggccgtggtgagcgcccggggattgtagagtcgagccatgctcgactgcttcatcgcctgaatcaaaggcagtcgagcatggctaaactccacaatgcgggcgtcaccgcccagccagccacccgatcacgccctcggcggcgcgcaggccactggcatagcacgccgtcagcaggtagccccccgtgggggcctcccagtccagcatctcgccggcacagaacacgccgggtactgcccgcagcatcaggccatcatccagcgcagccaggcgcacgccgccggcagtgctgatcacctcggccatcggccgtggacgcagaaggcgcaacggcaggcgcttgagcgtggtagccacggcaggcaggtcgtggcccgcatccttgccaaggatctcgaacaccagggtggccttcaccgcatccaggccggcctggcggcgcagatgctcaccaaaactgcgacccttgcgcggccgcgaaagatcggccagcaggcgtgcttcatcgcgtcccggcaccaggtccagccacagcatggcatggccatcacggttgatggtctcgcgcaggtctgcggccaacgcgtagatcaggctgccttcgatgccgtactcgctggctacgcattcgccctgcagcgactgcggttgtccggccaggtcgagccagtgcgcgaccaccggcttcaacggtgcgcctgcattgcgctgggcgaagaacggcgtccagtcgatgtcgaagccgcagttggccgattgcagcggcgcaatgtccacgcctcgtgcctgcaagggggcgacccaggcgccatcactgcccagctgcggccagctgccgccacccatcgccaacacgctggcatcggcgtggacatcgatctcgccggcttcggtggcgaagcgcagcgcgccgtcgttgccccagccgatccagcggtggttggcatgcaggcgcacgccctgttccttcagtcggcgcacccagccgcgcagcagcggcgcagccttgcggtcgaccggaaacacgcggccggagctgccgacataggtctccacgccaaggccggcagcccagtcgcgcagcgcctgcgcgtcgaagccatccagccagcggcccacggccgtggattgctcgcggtagcggctgtcgaacagcggccgcggatcggaatgggtgaggttgagaccgcccttgccggcgatcaggaacttgcggccgggtgagcccttggcctcgtacaggtccacgtccagccccgcggcgcgcaggcgctcggcggcgaacaggccggccgggccaccgccgatgacggcgacccgatggggcaatgcggtattacggcttgacatcgagcagctcgacatcgaacaccagcgacgaaccggccggaatcggcccgacccggcggtcgccgtagccgtaatccggcgggatcatcagcgtgcgcttgccgccgaccttcatgccggccacgccctcatcccagccgcggatgacctggccggcgccgagcgcgaaggtgaacggctggccgtgcttgaaggagctgtcgaaggtcttgccgtgcttggtttcggtgcggttgtcgtagatccagccggtgtagtgcacggtgaccttgctgccaggaacggcttcggtgccggtgccagcgacggtatcgatgcgctcgaaggtggtcagggtgccgcccggcggcggaccggagggctcgctcgagcagccagcggcggcgagggacagcagcaggggaagcagcaggcggcgcatcgggcgtctccagaagggcgcagggcgagggcggcaagggtagcgcatcggcgccgggtatcatggcggcatggcaaaactcctgctcaatctgcgcaatgtcggcgacgacgaatatgccgatgtctgcacgctgctcgaccagcacggcatcgcctggtaccgcaccgaacccagcccttggggcatttccaacggtggcctgtggctgcgcgaggacgccgatcatccgcgcgcgaaggcgctgatggccgggtaccaggcggcgcgcggtgtgcgcgtgcgggccgagcgtgagcaggcgttgcgggatggcacggcggagacctttggcagcctgttccggcggcggccggtgttcgtggtgctggtgctgctgggcatgaccgctgcggcggcgctggtgctgctgccgttcatgctgttgcgggggtagggggcgcggccgggttgcacccggcacccgcggtagtgccggccgctggccggcaacagcaacagcaacagcaacggcaggcaatccgttgcgggcagggcggtgtcggcaggcgggacacgccgtaaacccatccttgggggctcgatggcgccatccatggcgccaacggtcccgcctgcccacaccgccccgcctctgacagattccgggtgtctgccgggcttggggtcggatccctctgctgcgcagagggctctgacccctgaatctgtctgtgcgggcgggaggcgctaaaatggcaggatgatcgccaacaccgctgcctaccatttcgccgtcatcgacgccccccaggccctgtgcgaccagctgctgtcgcgtgcccaggcggccgggttgcggggcacgatcctggtggcgggcgagggactgaacctgttcctggccggtgagccggaggcggtcgaggatttctacgccgcgctgcatgccgatgcgcgttttgccgggatgcgggtcaagaccagcctgagcgagcaccagccgttcgcgcggctgaaggccaaggtgaaggacgagatcatcagcttccgccgcgatgacggccagccgctggactatccgcgtgcaccggcggtcgatccggccaccgtgcagcgctggctgcggcagggccatgatgacgccggcaagccggtggtgatgctcgatacccgcaacctgcaggaagtggagtacggcacgttcaaggatgcgctggtgctgcccatccacaagttcaccgacctgcccgaggcgctggcgccgcatcgcgaggcgctgaaggacagcaccgtgatcagtttctgcaccggcggcatccgctgcgagaaggccgcactgtggatggccaacgatggcatggacaacgtgctgcagctcgatggcggcatcctcggctacttcgaggaggtgggcggcgaaggttatgaaggccgctgtttcgtgttcgacgagcgcgtggcgctggatgccgaactgaagccgatggtcgaccagccgctgccggagccgcgccccagcgcgttctgacacgcttctgtagagccgagcccatgctcggctctacacggtccggcaggccctgaaccggctccgcgggaatcagcatcccgccaccgtcactggccgctgcgcctggccgaccccatgcaggggggatcctgagacggaaaaccgctgatgatcccgttgtcgatccttgacctggccccggtctgcgagggcagtgacaccaccgccgccttcgccaacatgctggaactggcccagcacgccgatgcgctgggctaccgccgttactggctggccgaacaccacaacatgcccggcatcgccagcgcggccacggccgtgctgatcggccacgtcgcgggcggcacccggcgcatccgcgtcggtgccggcggcatcatgctgcccaaccatgcgccgctgcaggtggccgagcagttcggcacgctggcttcgctgtatccggaccgcatcgatctcggcctcggccgtgcgccgggcaccgatcagcccaccgcgcgtgcactgcgccgctacttcgacagcgccgaccagttcccgcaggacgtgcgcgaactgctgcactacttcgagccggtacagcccgggcaggcggtgcaggcggttccgggcggtggcctgcgggtgccgacctggatcctggggtccagcctgttcggcgcgcgcatggccgccgcgatgggcctgccctatgcgtttgcctcgcacttcgcgcccgatgccatggacgaggcgctggcggtgtaccgccgcgagttccgcccctcggccacgttgaagcagccgcacgcgatgctggccctgaatgtcgtcgccagtgacagcgaggccgaatcgcgccgcctgttcaccagccagcagcagagtttcgtcaacctgcgccgcggccggccgggcaagattccggcgccgatcgacgacatcgaagccttctgggagccgcacgaaaaactcggcgtggagcgggccctggcctgcaccgtgctcggcgatccgcagcaggtggccgatggcatcgccgcgttcgtagagcggcactcgccggacgagctgatgctcaccgccaacctgcatgaccaccgtgcgcgcctgcgttcgttcgaactggcgatgcaggcctggcatgcccgccacgcgggctgaacaatggcgtcacggcccgttgcagccgcgacgggtctgatggtggctcttcccattggagcctcccatggcggatacccgcgctgaacacatcgcccagctggccgaactgatcaaggacgtggaggtggcgatgttcaccaccaccggcgtcgacggacgactctacagccggccgctggccacccagcaggtcaccttcgacggtgacctgtggttcgtcatcaccgccgacagcccgaaggttgccgagatcgcgcttgatccgcacgtcaacgtggcctatgcctcgccgtcgaagaacacctacgtatcggtggcagggcgcgcgcgcatcgttgatgaccgcgcgaagatcgaggaactgtggtcgccggcgatgaaactgtttttcccgggcggcaaggacgacccgaacctgcgcctgatccacgtgcgggccgactcggccgagtattgggatggtccgggcacgctgctgggcaaggcgttgaatttcgtgctgtcggcggtgcaggacgagccggcgcaattggccgacaatggcttcatcgatcttcggtgaggatcgatgtccggtattggtagtgccggccgctggccggcagacctggaaacgtggcaaccggccagcggccggctataccgggttccggctcagaaccagcgctggaacaggtccaccgtgtaacccaccagctgccccgaactgaagccgaagaacgcgatcgccgccaacgcggcgatccagttgaacagcatcagcgcgccatcgcgttcaagcagcgccagcgagaacagcagcagctggaagccgaacaggaaattggtgaagggaatcggcaacgacagcagcaggcccagcagcaccagcagcaggccgctgaaggcgtgggcggggaggggtgtcaacagctgcggcaggcgtggcctcagcatcctgtccaggcgccgcagtgggcggtcgatgcggtccaggaaacggtgcatggtgccgcgcttgggtccgcggcgggcaatgaagccgggcagccacggccggcgcaggcagaacagcatctgcaggccgatcaggatcaccagcgggccgctgaccgcgccacccatgcccgggatcgggatgaacgagggcaggatcgccacgaacaggaacacgccgaacgcgctctgctgcaggttgctcaggatctggccgagcggcatgtgctcggcggggtcgccggaagcgaacatctccagcagggtgcggatgccctcgttgcggtaggccgggcgctcggcgcctggaccctggccggcctcaggcggtgagctcatcggcctgctcgtcggacagcgtgcgcagcagcagcttgtccacccgcgcaccgtccaggtcgaccacttcgaagcgccagccggcccagtcgaagtactcgcctgcgtgcgggatgcggccgaagtagtggatgcacatgccggccagggtgtagtaatcgccgtcctcggcatcgggcagctcgttgctgccgatcagttcgcgcaggtcttcgatcggcagcgagccatccaccagcagcgaaccgtcctcgcgggtcaccaccagcgcatcttcatcggcattctccaccgcctgcaggcggccgaccacggcgcccatcaggtcgctgatggtcaccaggccctggatctcgccgtactcgtccaccaccagcgccatcgactgctgttcctcgcggaagatctccagcagcttcatcgcgtgggtcgattcggacacgtagagcggttcgcgcagggtctggaacagcgcgttgtcgccgcgcgccatgcgcgtggccagcgatttcaattcaagtacgccgaccacgtccatgtcgttgtcgcggtacaccgggtaccgcgagaactcgtgctcggccatgatttccaggttgcgctccagcccggcctgggtgtccagccaggcaatgcggttgcgcggggtcatcaggctgtcggcggtgcggtcgcccaggcgcatgacgcggttcatcatgtcacgctcgtgggcgtcgatcacaccggcttcgtggctctcggccaccagcatgcggatctcttcctcagtcaccgaggcgacttcatccttgcccaggccgaacaggcgcagcaccagctgggtggtcctggacagcagccagacgaagggcagggccagcttggccagccagctcatcggcatcgcgaccaggccggcaatggcctccgagcgggtcagcgccaggcgcttgggcaccagttcgccgaagatcagcgtgatgaaggtgatcaggctgacggccagcgcggtaccgatgttgcccgcgtacgcaaaccccggcatcagcccctggatccagccggcgaaggcctcgcccagcgcctcaccgccgaggtagccggtcagcacgccgatcacggtgatgccgatctgcacggtggacaggaagctctccggcttctcggacagctccagcgccttggccgcgcgcttggaggtggcagccatctgcttcaggcggctcttgcgcgaggtcatgaccgacatctcggacatggcgaagaagccgttcagcagaacaagcgcgaagacaatcaggatcatttcaaacacgggcgtcgtccccggttggtggcagggagggcgggtgctggcgatggcggcaggcgctcaggaacggggtccggcgcggcgcagggggataagggtcgtcgtccataaggtgcgcccgaaggcgcgctggcatcttagcaaaggggcatggcagggtggcaaccgcctgttcaggttgggggttccaaggcctcgaaagggggcggggatacccgtgatggtcatctagccgtcataattccgtctggtgccgtccttcccgcgacggctgacaggtttctcaatgttctctctgcagaccattttcggttccggcaaacagttctacaccctgctcgatgaggctgccgtcgcggcttccgacgccgccaaggcgctgcattccatgctgcgcgaggccgaccgccagcccgcgctggacgccttcaagctggcccgcctgcgcgaacgcgcggcctcggacaagatcagccaggcgctggtggacagcttcatgaccccgatcgagcgcgaagacatcgaagcgctgggctcggcgctgtacaagattcccaagcagatcgagaagttcgccgaccgctattcgctggccacgacgcacctggagcacatcgacttcgcgccgcgcgcggcgatgctcgaacaggccgccggcgtggtggtggagatggtggccgacctgcgccacatgaacctggaccggatgaccgcgctcaacgagaagctgcgctcgctggagaacgaggccgaccgcctgatgctcgagctgtaccgcgacatctattcgggccgcctggacaacctgcagatgttcctgctgaaggagttcttcgagatcctggaaaaggccatcgaccgctgccgcgaggctggcgtggtggcgtaccagatcgtgttgaagaacagctgacggacgccgccgcatgttgacccttgtcctggtggtgatcctggccgcgctcgtcttcgagttcatcaacggcttccacgacactgccaactccattgccaccgtggtggcgaccaaggtgctctcgcccggctgggcggtgatgctggccgccttcatgaacctcatcggtgcactgaccggtaccgcggtggcgctgaccatcgcctcgggcctgctcaacaccaacgtggtcgaggtcaccccgcaggtgatcctgtgcgccctgctgggcggcatcatctggaacctgatcacctggtggaagggcctgccgtcctcgtcctcgcacgccctgatcggtggcctctgcggcgccggcctggctgccgcccacaacaactgggacgcgctgatctggtccgagcgcctaggcagctgggcgcagaacaagggcctgctgtggaaggtgttcgtgccgatgatcacctcgccgattgccggtttcctgctcggcatcgtggtgatggtgctgctgtgggcgctgatcgccggcctggccaagatcggtggtgccatcggccgcctggcgcgtccgcgcatcgtcaacgccttcttcggcaaggcgcagatcgcctcggcggcctacatgggcttcgcccacggccacaacgacgcgcagaagaccatgggcatcatcgccatgaccctgatcggtgccgaagccaccggcgcattgaacgacctgccgtcctggctggccttcatgcacccggacgcgcatgccggtgatggcatcgcgatgtggatcgtgctcacctgcgcggtggtgatggcggccggtaccgcttcgggcggctggaagatcatcaagaccctgggccacaagatggtcaagctgcacccgatccacggcttcgccgcggagaccagctcggccaccatcctgaccctggcggcccacttcggcatgccggtctcgaccacgcacagcatctccaccgcgatcatgggcgtcggcttcgccaagaacccgcgctcgctgaagttcggcgtgatcgagcgcatcgtctgggcctggatcctgaccatcccggcggccggtggctgtgcgtacctgatcctgaagctgttcgagctgttcggctggacctgatcgccacgccagggttgcaaacgaaaaagcccgccgtatcaggcgggctttttcatgggcaagaattttccgcacccaccgtgtcgaccaaggtcgacacctaccagagcagaaccagggtcagggcccgttgccaagcaacgggatccgcccccgtgccgaccaacggtcggcacccaccaacagccgtcaggaagccagcttttgcagttgccgttgccgttgccgttgccgtggctgccagcgggtgccgggccgcaggcccggccaaacccctcaattacgctggaacaacgcctgtacatccttgcggaacgccgcctggctgtccgcccggctgtagaacatgtgcccgcccggataactgcgcacctgcacccggtccggattgctgcccatcgtcggcatctggtccacggtcaggatcgagcccatgaacgggcacgacaggtcgttccagccatgcacgatcagcacctgcagatgcgggtcgatcgccaccgcctggcgcagctgggtcaccgcaccctggcgcagttcgccattgcggtcccacagccggttcacgtcgtagttcagcgcctggtagcgcgcatctactttccagccgaccacgcgcgtcacgaagtcgaccatcgccgtggtggtcggcgcgatgatgctgtccagcagtgggtcgttggcgcgctgctccggatcattcgggaacggatcgaacgcggtcacgttggagtcgtagcggctgcccagcgtgcccttgtcgcggaacacttcacgcaggtaggcctgggtctccaggcgcccgccagcgcggcgcacgaactgcgggtccagtccggtcagcgcggtgacccggcgcagcatggcttccgtagcctgcggatcgctgcggcccttcatcaacgcggtggcgtaatcgccacgggtgtactccaccacctcgcgcatcgccgcatcggtcagcttgccctggcgctccaggtgcgccgcggcgatcgacggcagcgtctgcatccacgccatcggcgagacatcggcgttgtcttccagcgtcgggctcaggtagggcgagaccagcaccagtccgttcattgccacgcccagccgggtctgcaggaagtgggtgatgcgcgggccgcggtagccaccgtagctctcgccggtcaggtacttgcgcgaggccatgcgctggttgcgcagcagccagtcgtagatcgagcgcgacaggtattcgacgtcggcactggggttgtagagcgctttcttggcttcatcgtcgccgatccgcgcgcggctgaagccggtaccgaccggatcgatgaacaccagatcggtgaagtccagccaggtgcccgggttgtcgtgcagggtggccggcgccgatgcgctgtcaccctctgagccgaaggtcaccaccttgggcccgatcgcgcccatgttgagatacaccgacgacgcaccggggccgccattgagcgcgaaggtcaccggccggtccttgcccggcatcgtgtaggcggtgaacaccacatcggcgatcaccttgcccttggcatcgcgtaccggcagggtgccgacggtggcggtgtagtccagggtgcggccggccaggcgcatgctctggcgggccgaggcgtcggcgggcagcgcaggcgcttcggtcttgtcgtctttcgggtcgggcttgccctcggcgtcgggcgcggccagcacgctggcaggggcgatgagcaggccgacgcagagcgcggcagtgtgcagcagggacttcatggcaccggttcggcagcggaagggggttccgatgctaggccggtggcgggccatgccgtatgtgtccaaaggcatggccgtgcgttgagcccgctactggccagattgggtcaagcggggagggtggctgcggcgtcgtcatcggccagcaggccgtagacggccgagtcggccagctgcccctggatgcgccagcgctggcgcagcaccccctcgcggtggaagcccaggcgttccagcacgtgcgcggacggcgcattgcgcgggtcgatctcggcttccacccggtgcaggtgcagggtgcggaacaggtaggccagtacctgttgcagggcctcgtgcatatagccctggccctggcgatcgggtgccagcaggtagccgatctcggcgcgcgccgcatcgcggtccaccgcgaataccacgcagatgcccagcagcggaccttccagcgactcgcgcacggccagcttcagctgggtgccgatggcatgggcggcgaggtcatcgtcgatctgctcgcgcgcttcggccagtcgcgtccaggctggatggttccaccatcgcatgacatccgggttggactgcagcgtgaacagcgcggcggcgtcgtcacgacggatcgggctcaggaccagccgtgcactgtgcagcggcaggccggggaacagcagcgagtggctggccaatacgatggtccacacgggtggacgcgcattatggcgctgccgggtttgccgatgggggcggatggggtcggagcgcatggggtcggatccgtttcctgacaggaaacggctctgaccccactgccgccaaccgggtcagagccctttcctgcggaaagggatccgaccccgctccggatcagacttccagcgaagccaggtcgcccttcgactccagccagcccttgcggtcggacgcgcgcttcttggccagcagcatgtccatcagcgaacgggtctgctcgccatcgtccacggtcagctgcaccaggcggcgcgtatccggatggatggtcgactcgcgcagctggttcgggttcatctcgcccaggcccttgaagcgggtgacgttgactgcgcccttgatcttctcgcgctcgatcttgtccagcatcgaacgcttctcttcctcatccagggcgtagaacacctgcttgcccacgtcgatgcggaacagcggcggcattgccacgaacacgtggccggcatcgaccagcgccgggaaatgcctgaggaacagcgcggtcagcagggtggcgatatgcaggccgtcggagtccgcgtcggccaggatcaccaccttgccgtagcgcaggccggtgatgtcgtccttgccggggtcgcagccgatggccacggccaggttgtgcacttcttcggaggccagcacgctgttggacgacacttcccaggtgttgaggatcttgccgcgcagcggcaggatcgcctggaaatccttgtcgcgcgcctgcttggcgctgccgcctgccgagtcaccttccaccaggaacagctcggtgcgcgacaggtcctggctgatgcagtcggccagcttgccaggcagggccgggccctgcgtgaccttcttgcggacgaccagcttctcggtcttcaggcgcgcactggcgcgctcgatggcgatctgcgcgatcttctcgcccagctccacgttctggttcagcaacaggctgaacgcatcgtgcgcggcgccctctacaaagccggcggcctggcgcgaggacaggcgttccttggtctggccgctgaactgcgggtcggtcatcttcagcgacagcacgaatgacacccggtcccacacgtcttccggggccagcttgacgccgcgtggcagcaggttgcggaagtcgcagaactcgcgcagcgcctcggtcaggccggtacgcaggccgttgacatgggtgccatgctgggcggtcggaatcaggttgacatagctttcctggaccagctcaccttccggcagccaggccacggcccagtccaccacctcggtgtccttcttgaggttgccgacgaacaggtcggccggcagcgattcgcgatcgcccagttccagcttcaggtagtcgcgcaggccgtcttcgtagtaccaggtatcgacttcaccggtggcttcgtcggtcagcttgacggtcaggcccgggcacagcacggccttggcgcgcagcaggtgcttcaacgcgcgcaccgcgaacttgggcgtgtcgaagtacttcgggtccggccagaagcgcacgcgggtaccggtgttcttcttgccgacggtgccgaccacctccagcggcgtggcgcggtcgccattgcggaaggtgatgcggtgttcggcaccttcgcgcttgatgtgcacctccaccagggtcgacagcgcgttgaccacgctgacgccgacgccatgcaggccgccggagaaggtgtagttgttgttgctgaacttgccgcctgcatgcaggcgggtgaggatcagttcgacgcccgggatcttctcttccggatggatgtccaccggcatgccgcggccgtcatcgctgacctccacgctgccgtccttgtacagggtgatctcgatcgagcgggcatggccggcgagggcctcgtccaccgagttgtcgatcacttcctgcgccaggtggttcgggcgcgcggtgtcggtatacatgccgggacggcgcttgaccgggtcaaggccggacaggacttcaatatcggcggcgttatagcgggcgttcatctatcttctaaagcgcggagcgacgcgcaagtgtgcggtctggacggcgattttgcacgcctgcggttcagcctcggcgccggggagggggtaaaatggcagccgctggaatctgaacgccggcggccccatcgggtcgaaacatccaagccataccgcgaggaggacctcatgaagaagttgctgaccgttgcaatcctggccgctgccgccgttgcagtgccgctggtggtggcgcagaacgcgggccagccggccccgcagcagggtgaccaggccgacaaggcgcaggccgaggccgatgccaaggccaagcgtcgtgcccaggccaatgccgaaatgaaggcgcagggccagccggccccgcagaaggaagaagaggaagaagcgcgcaagaagcgctgatcccgcaacctgccaagcgcccttgcgacaaggggtgcgcaacggaacgccccgctcagcggggcgtttctttttaggaacgtggcgtctgccccttgggttggcggccatcaatctgtaaactatggctttccgggagtaagtgcgtgtccaccctttgcgaatgggctggagcggccaagcgtggcttccagcatggcgggtcgcaggtgacggtcgatttggccggcacggccgccccgacctcgcacgatggtccccgtccggcgcctgccgccgcacggatccgcacctccctcgctgtcccagcgaaccggaaaaccccctccgagcaccatgcccgccctccgggtgcgcgtggtgttgccgttttccatttccagacaggatgcttgcagccatgactcccttgattttcgtaaccggcggcgtggtgtcctcgctcggcaaaggcattgccgccgcgtcgctggccgccattctcgaagcccgtggcctgaaggtcacgatgatgaagctcgacccgtacatcaacgtcgacccgggcaccatgagcccgttccagcacggtgaggtgtatgtcaccgacgacggcgccgagaccgacctcgacctgggccactacgagcgcttcgtgcgcacccgcctgagccgcaagaactcggtcaccaccggccgcatctacgagaacgtgatccgcaaggagcgccgcggcgactacctgggcgcgaccgtgcaggtcattccgcacatcaccgacgagatccgccgctgcatcgacgaagccaccgaaggctacgacgtggcgctggtcgagatcggtggcaccgtcggcgacatcgagtcgctgccgttcctggaagcgatccgccaggtgcgcaccgagcgtggcccggagaaggcgctgttcatgcacctcaccctggtgccgtacatcggcgccgccggtgagctgaagaccaagccgacccagcattcggtgaaggaactgcgttcgatcggcatccagccggacgtgctgctgtgccgttccgagcaggccgtgccggattcggagcgccgcaagatcgcccagttcaccaacgtctccgagcgcgcagtgatcagcgtgccggacgtggacgtgctgtatcgcattccgtcgggcctgcacgcgcagggcctggacgagatcgtggtcaatcagctgaagctggccgacaaggccggtccggtcgatctgtcgatgtgggaggacgcagtcgatgcgaccctgcatccgctggatgaagtgaccatcgccgtggtcggcaagtacgtggatcaccaggatgcctacaagtcggtcggcgaagcactgaagcacggcggcctgcgccagcgcaccaaggtcaacctgaagtggctggaagcacaggatctggaaggcaccgacatggccgcactggccgatgtcgacggcatcctggtgccgggtggcttcggtgaccgtggtttcgaaggcaaggtgctgacctcgaagttcgcccgcgagcagcacgtgccgtacttcggcatctgctacggcatgcaggcggccgtcgtcgattacgcgcgcaacgtggtcggcctggaaggcgccaacagcaccgagaacgaccgccagtcgccgaacccggtgatcggcctgatcaccgaatggcgcaccgccaccggcgatgtcgagaagcgtgacgacaagagcgacctcggcggcaccatgcgcctgggcctgcaggaacagcgcctgaagccgggcacgctggcccgtgagctgtacggcaaggacgtcgtcgccgagcgccaccgccaccgctacgagttcaacaaccgttaccgcacccagctggaagatgccggcctggtgattgccggcaagtcgatggacgacaccctggtggaagtggtcgaactgccgcgcgacgcgcatccgtggttcctggcctgccaggcgcacccggaattcctgtccacgccgcgtgacggccacccgctgttcatcggtttcatccgtgccgcgcgcgagcgcaaggccggcggcaagctgctttccgaagcgcgcgcctgacttgtgaatgggggcttcggcccccatcctgcatgcttcaacccccagcgcaccggcccggccggtgctgcggacaacaaggaaacgccatgaaactgtgtggattcgaggtcgggctggaccagcccctgttcctgatcgccggcccctgcgtgatcgagtcgatgcagctgcagctcgataccgccggcaagctgaaggaagtcaccgacaagctcggcgtcaacttcatcttcaagtccagcttcgacaaggccaaccgcacctcgggcaccgcgttccgcggcccgggcatggaagagggcctgaaggtcctggccgaggtcaggaagcagatcggcgtgccggtgctgaccgacgtccatgagtacaccccgatggacgaagtggcctcggtggtggatgtgctgcagaccccggcgttcctggtccgccagaccgacttcatccgcaaggtgtgctcggccggcaagccggtcaacatcaagaagggccagttcctggcgccctgggacatgaagccggtcgtggagaaggccaaggccaccggcaacgagcagatcatggtctgcgagcgcggtgccagcttcggctacaacaacctggtcagcgacatgcgctcgctggcggtgatgcgtgataccggttgcccggtggtgttcgatgccacccactcggtgcagttgccgggcgggcagggcaccagttccggtggccagcgtgagcacgtgccggtgctggcccgtgctgccgtcgcggtgggcatctccggcctgttcgccgagacccatccggatccgtccaaggccctgtccgatggccccaacgcgtggccgctggaccagatggaagcgctgctcgagaccctgatggagctcgacgcggtgaccaagaagcacggcttctcgcgcttcgcgtgagtcgtgacccgagggtggcgctggaagcccagcgtcatcgccggcactggaaacagtggccctggggcctgatcgcactgggcctggccgtgctgttcaccgtgggcatgtttggcctggtgctgatcggtgcggcgtcggtgcgccccccgggtgatggcagcagcgcgcttgatctgcgtgcgtatttcattgcgctgctggtcgcggagctgctcggtgccgcgggctgcctcgcggccgcggtgctggcctggcggctgaatcgcggcaaggtggcggctggctttgcgatcatcctgctttcgctgtggctcggcgccctgttctacggattgctttgatgaatacgagcacgtcggcgcgcggctggccctggggcctggtcgcgctggggctgtccgtgctcgcctgggcgtccctgctgctgggagtaatggcctttgcggccagcttcggctcgccgggtgacggaaaccatggcatccaggccatgcagtactggatcgtggccgcgctggtcgcgctgggtgtgtctttcgtcggcagcctggtggcgatagtgctcgcctggcgacgccgtcgtggacccgtcgcggcggcggtggccggtgcgttgctggtgatgctggtgtcgctggccctgatcttgatcgggtccagctggggctgatgccgcccaggccatttggcaagtggcgggcagccggggataatcacgcggcattcgttttgtcgccccctctccagacaggtaaccggcccgaccatgagtacgatccgcagcatccacgcccgtgaaatccttgacagccgtggcaaccccacgctggaagccgaagtcatcctggaggacggttcgttcggtcgtgccgcggttccctccggcgcctcgaccggcaccaaggaagcggtcgagctgcgtgacggtgacaagacccgttatctgggcaagggcgtgcgcaaggccgtcgacaacgtcaacaccacgattgccgccgcgctgaagggttttgaggccaccgaccaggccggcctcgaccgtcgcctgatcgatctggacggcaccgagaacaagggccgcctgggtgccaacgcgctgctgggtgtttcaatggccgccgcgcatgccgccgctgcatcgaacaagcaggcactgtggcagtacctggctgccaggaccggcgtgaccccggcgctgccggtgccgatgatgaacatcatcaatggcggcgcgcatgccgacaacaacgtcgacttccaggagttcatggtgctgccggtcggcttcacctcgttctccgaagcgctgcgtgccggtaccgaaatcttccattcgctgaagtcggtgctgaagggccacggcctgagcaccgcggtcggcgacgaaggtggcttcgcgccggacttccgcagcaacgtcgaagcgctggacaccattctcgaagcgatcggcaaggcgggctacaccgccggtgaagacgtgctgctgggcctggacgtggcctccagcgagttcttcgagaacggcaagtacaacctggtcggcgagaacaagcgcctgacctccgagcagttcgtcgacttcctcgccgactgggccgcgcagtacccgatcatcacgattgaagatggcctggccgagaacgactgggccggctggaagctgctgaccgaccgcatcggcaagaaggtgcagctggttggcgacgacctgttcgtgaccaacccgaagatcttccaggaaggcatcgactcgggcactgccaatgcgatcctgatcaaggtcaaccagatcggcaccctcagcgaaaccctggaagcgatcgccatggccgatcgtgccggctacgccgccgtggtctcgcaccgttcgggcgaaaccgaagacaccacaatcgccgacatcgcagtggccaccaccgccacccagatcaagaccggttcgctgtgccgcagcgatcgcgtggccaagtacaaccagctgctgcgcatcgaggaagcccttggcgccggcgcgcgttacgccggtcgtgacgcgttcgtttcgctgaagcgctgagccgatgcgcgactggcgctggatgctgctggtgctggccctgttgctgggctggctgcagtaccgcttctggtttggtccgggcaattcgggtgaagtgatgatgctcgaagcccaggtcgccaaccaggagcgggacaatgagggcttgcagcagcgcaatgatgcgctcgctgcggaagtgaaggacctcaaggaaggccagtccgccatcgaggaacgcgcgcgcagcgagctgggcatgatcaagcccggcgagaagttctatcgcgtggtcgaggatgcgccggtgcacccggcgcagcctgcggcaggtgtcagtgcgcaggttggcgaccacccggcggacgtgccatgagtgcggcgatctgggtcgtggttccggctgctggccgtggcacccgctttggcgcgccgttgcccaagcagtacctgcaggcaggggggcagatcctgcttgcccataccctggacgccctgctggcgcacccggccgtggccggggcgatggtggtgatcggcccggacgacgccgactggcccggctggaacgagtgggcgggcaagtcggtgctgacctgcatcggtggcgcgacccgtgccgcttcggtgctggctggcctgcaggcgctgccggagacggtgcgcgctgatgaattcgtgctggtccacgatgccgcgcggccgaacctgtccctggtcgatctcggccgcctgcttgaagtcggtcgtgccgatccggtcggggcgatcctggccgcaccggtacgcgacaccctcaagcgtgcgggcgacgacggtggcatcgatggcaccgagccgcgcgagcggctgtggcgcgcactgacaccacaactgttccgccgccaccagctcagccgcgcgctgtccgaagccgccgccgccggtgttgaagtcaccgatgaggccatggccatggagcgccaaggccagcgcccgctgctggtcgagggcagcgaggacaacttcaaggtcaccaccccggccgatctggaccggttcgaattcgtactttcccgccgcgccggctgaccgtccgcgcggccctgcagcaagggttgcatccatgagcaccgcaccgttcccgcccgtccgcatcggccagggctacgacgtccatgccttcggtgaaggcgaccacatcatgcttggcggggtgaacgtgccgcacagctgcggcgtgcttgcacacagcgacggcgacgtgatcctgcacgccctgtgcgatgcgatgctcggcgcgctggcgctgggtgacatcggccagcatttcccgcccagtgacgaccgctggaagggcgccgacagcagcgagttcgtgcgccactgcgacagcctgctgcgcgagcgcggctggcgcgtcggcaacaccgacatcaccgtgatctgcgagcgtccgaaggtcggcccgcatgcgctggccatgcgtgagcgcatcggtgggttgctgcagctgccgctggacgcggtcagcgtcaaggccaccacctcggagaagctgggcttcaccggccgtggtgaaggcatcgccgcgcaggcggtcgtgttgctggtggcggcatgatcccgctgccgttggcgtttggtgcgccgttgttgacggcgcgcatccgcaccacgccggacgatttccaggtggatgaactgccggcgttcgaggcgagcggtgaaggcgagcatctgctgctgcacatccgcaagcgcggcgccaacaccgtgcatgtggccaaggtgctggcaaaatgggcgggcctgccggaaatggcggtgagttacgccggcatgaaagaccgtcacgcggtcaccacccagcgtttcagcgtgcacctgcccaagcgcattgcgccggacctggccgagttggccagtgacgaaatcgaagtcatcgaggcaacctggcacaaccgcaagctgcagcgcggcgcactggccggcaaccgcttcaagctggtgctgcgcgaggtgcagggcgatcccgccgcgatcagcgagcgcctgcagcagattgccgcgcgcggcctgccgaactggtttggtgaacagcgtttcggccgcgacggtggcaacgtgccggctgcactggcgatgttcggtggccgccgcatgcgcaaggaccagcgttcgctgctgctctctgcagcccgttcggcgctgttcaaccgcgtgctggccgcgcgcgtggagcagggcagctgggaccagccgctcgatggcgaagtctggatgctcgatggcagtcgcagcgtgttcggccccgagccgtacacggatgtgctggccgagcggctggcgcgtttcgacatccatcccagcgcgccgttgtggggcgaaggcgagctgcgcagtgccgacgcggcacgtgagctggagctggccgcgctggacgacgacgagtcgaaagcactgcgggccggcctggaagacgcgcgcctgaagcaggagcgccgcgcgttgcgcctgcgtccggcgctgctgcagcaccagtggctggccgacgacgtgctggaactgtcgttcgcgttgccgccaggctgctacgccaccgccgtgctgcacgaactcggccccgtcgaagacgcctcgcaggcctgacagaaaaaaggggacggagggaattaagtcgtttgtggcacaaacgacttaattccctccgtccccttttcaacgccgcgccagcagcaccagtaccgcgccggtgccgccttgtccggtcggtgccgaatggaatgccagcacgtcgttgcgcagccgcagcaggcgatcgaccaggttcttcagcaccggtgcgccgccatcggactgcagtcccttgccgtggatgatgcgcacgcagccgtactcgtgtgcatgcgcttccagcaggaactggcgcagcagggcttcggcctgtgcggcggtggcgccgtgcagatccagttcgtcctgcaccgagtactggccgcgcttgaggcgctggaacaggcgtggtggcaggttgtcgcgtcgatagctggccacgtcgccggcttccagtggcgcactgtcgcgcagcagccgggcgaactcgccggccgcttcggcctcgtcacgttcggccatgcgcgcacgcggtttcggccggggcgcggcaggtgccggctcggcatccttgcgcagcggcttcacttcgccgatggccgcacggaacaaggcggccggatcttcgtcatcagggtgcgacatgcgcacagggtaaaccgccggcgcaggtctgcctatgacggttcgatgtcggccgtgaccgctgacagggtaggaccggcggcccgcatgcggcacaatagacgatgcccttgcagggtcgaccgcttccgcaggggagcgcgacggtcccgcccacactgcacggtgatggaatcgaattcttggaaaatcaagcggttaaatcgaagatgcgaatcctggtcagcaatgacgatggtgtcgacgccgcaggcatccggatgcttgccgcggtcctgcgcgaggccggtcacgaagtcacggtggttgcgcccgaccgcgatcgctccggcgccagcaactcgctgaccctggacctgccgatccggctcaagcgcatcgaccattacaccgtttcggtggccggtacacccaccgactgcgtgcacctggcgctgaccggcctgcttgaattcgagcctgacattgtcgtgtccggcatcaacaacgctgccaacctcggcgacgacgtgatctattccggcaccgtctcggcggcgatggaaggtcgcttcctcggcctgccggcggtggcggtctcgctggtcagccgcaaccacgatccgaagcacttcgagaccgccgcgcgtgctgcggtggagattgtcgcccggctcaaggccgatccgctgccggccgacaccatcctcaacgtcaacgtgccggacctgccgtggagcgaggtcaagggcttcgaggtcacccgcctcggcaaccgccatcgtgccgaaggctgcatcgcgcagaaggatccgcgcggcaacgaggtgtactggatcggccctgccggccgtgagcaggattccggtcccggtaccgatttccacgcggtgcgcaccggccacatctcgatcaccccgatccaggtcgacctcacccgctaccaggcgctggagaaggtcgccagctgggtcggcggcctcagcgccgcgctggaccagccggcatgagcccacgcctgcgattgcagccggaagccgtcggtatcggcatgacctcgcagcgcgtgcgtgaccgcctggtcgaccgcctgcgcgaagccggcatcgtcgacgagccgaccttgaacgcgatccgggtggtgccgcgccatctgttcatcgatgaagccctggcctcgcgtgcctatgaagacaccgcgctgccgatcggccatggccagaccatctcgcagccctgggtggttgcgcggatgaccgaggcagtgctgcaggtctcgccgaagcgggtgctggaagtcggcaccggttccggttaccaggccgccatccttggcgcgttgggcctggaggtctacaccgtggagcgcattggtgatctgctgcgccaggcccgcaagcgcttccgtgcgctgggcatgaacatccgcaccaagcacgacgacggccgcgtcggctgggccgagcacggcccgttcgatgccatcgtggtcactgcggcggcgccggcactggtcgacgccctgatcgagcagctggccgaaggcggccgcctggtggcgccggtcggtggccctggggcgcagtcgctggtacagctggaccgcaaggccgacggcagcatcgaacaacacgtgctggcgccggtcacgttcgtgccgctgctgtctggcatgctcgactaatccacggagcagggttgcatgaagattttcgggccgctgtacgagcgggcgatgaagtgggcggcgcacgaacgcgcgccgacctacctgacggtgttgagcttcttcgaggcgatcatcttcccggtgatgccggaggtgatgctggcgccgatgtgcgtggcccagcccaagcgcggctggtggtttgccaccctcagcctggccggctcgatggtcggtgcgctggtcggctacgcgctgggtcactacgctttcgaggcgatcaagccgctgtttgaagtgctgggcatgctgccggcgatcgagcagggcatcaccaccgtgcaggcgaagatggccgaatcgccgtgggcggtgttcaccttcctggtgctgggcggcttcatgcccatcccgatgaaggtcttcacgtgggcatcgggtatcgtcggcgtaccgatgccgcagtacctgttgagcatgctgatcggtcgcggcaagcgcgtgttcgtgctggctgcggtcatccgtatcggtggtgcgcgtgctgaagcggcactgcgtcgctggattgaaccgctgggctggatcgccaccgcgttggtggtggtgctgatcgcctggcttgtatggaggtcgaagttcgcatgagtcctgatcgtctgagcaagggagtgcgcatcggcgcgctggcgttgctggtttccaccctggccgcctgcggcaccgccactgtggttcgtcctggtgggggcagcaccggtggtggcgtgaccacgccgaagacctcggtgcccaagcccgggcagaccgtggtggtgcgcaagggcgacaccatctatgcgctggcccgcatccatgacatcaccccggccgacctgattgcctggaacagcctggacaacccctcgaccatccatccggggcaggtgatccggctgtatccggccggtgccagcggcggccgcacgccgaccacggtggtcaccgcgccgcgcccgggcggcagcagcgccggcagcacggcgccaactccggcgccggttggtccggtgaagagcaacatcgcctggcgctggccggccgacggcgcgatcgtcggccgctacgttgccggcgatgcgaccaagcagggcgtggacatcgccggtaccagcggccagccggtcagggccaccgccaacggtgtggtggtgtactccggcgccggcctggtcggctacggcgagctgatcatcatcaagcacagcgaccagtggctgtcggcctatggccacaaccgcaagcgcctggtgaatgaggggcagagcgtgaaggccggtgagcagatcgccgagatgggccgcaccggtgcgaaccgcgacatggtccacttcgagatccgctacaacggcaagccggtcgacccgcagcagtacctgccggcgcgctgatcgtcgattcataatccgggcggatccccggcccggcgcagcgcgccgggcgttcgccgacggtgcggcccatgggccgcaaacaccgccggctcacccgctacaacggcaagccggtcgacccgcagcaatacctgccggcgcgctgaggcagtgggatcaggtggcgccgggcaatgctcggcgttcccgacctgtagcgtcgagccatgctccactcgctgtacgctggccgccgtgggtggccgtttgcgaccttgagtggcacatctcaagcttcccgacaagccagggaagcggcatgcttcaacggaaccagcctcccgatccggtgccgcatgtctcgcccaacagcccttttcgcgctgctcatcgtcgcgccgttggcgaccgccgccagcgatccacgtgacgtggtcacccgcctctacgacgccatccaggcgccgcagtcgaacgaaacggcgattgctccgctgctgggtgatgccctccgctcagccatcgatgcgcagcgtgcatatgaacaggcctgcaccgcactggccgcgcccgacgagaagccgcacatgctcgaccagagcccgtatctgttggcgccggaccggccggagacgataacggtgggagcgcccggatcgagcggtgacgccacctgggtccatgtcgacatggccctgggcgactatcgctggaccgaccgggtcctgctgcagcggcagggcccggactggaaggtcatggatatccgctgggggcagggtggcaacctgatcggtcggctgcaggcgttctccgcgttccgctgcacaccttcgggcagctagtgcccgggcgcacccggcggctcgaactcagccttccaggatgaaggcggccgcgaccttgcggccttcgccggccagaatgttgaaggtgcgcgcggcggccggattgttcatcacctccaggccgatgccacgcgacagacaggcggccatcaccaccgcgggcgggaatacctgacggtctcccgtgccgagcacgatcagcgccggattcagcgccaggatcggctccaggtccgccaactgcagcgcggcggcacttgccaccggccagtgcgtgaccagttggtccggggtgaggaagaaactgccgcccagcacttggtcattcaccttggccgagcggccatctgcggcacgcaggctgtaggcgtaatccggcggttcgtggttcagctgcatgacggtaggacgatcagccgcgcggcagcacgatctggcgctgttccttgctcgggcggtacagcaccgcgacgtggccgatgcgctgcaccagcgcgctttcggtggcttcgacgatctcgccgatcatcgcgtcacgggcgtcgcgatcctctgcggcgaccttcaccttgaccagttcgtggcgctccagcacttcgttcagctcagcgatgaaggctggggtcacacccttgccgccggtctgcagcagggccttcaggtcgtgggcttggccgcgcaggaaacgggtctgggaggcggtcagggcgatggacatgcaggaaaacacggttgaatgggacgatcagggtatcatgaggaccccatcagcccctattttcaatggctacccgcagcaaaagcagccagcgctggctcaaggaacacttctccgaccccttcgtgaagaaggcgcaggccgagggcatgcgctcgcgcgccgcctacaagctcgaggagctgctagaacgtgaccgcctgctgaagccgcacatggtggtggtcgaccttggcgcggcccccggcggctggtctcagcaggttcggagacagatcggggacaccggtcgtgtgctggcgctggacatcctggacatgccgccgctggccggcgtggagttccttcatggtgacttcagggaagaagccgtcctatcgcagtttgaagccatgctcggggatcagccggtagaccttgtgctgtcggacatggcccccaataagagtggtgtaggcgcggtcgaccagccgcggatgatgcacctggcggagctggccctggattttgccgacaaccacctgaagaccggtggggcgttcctgatcaagctgttccagggtgagggctttgacgactacgtgcgcgacatgcgccgccgttacgacaaggtctccatccgcaagccggaggcgtcgcgcaagcgctctcccgaggtgtatgccttgggtcagggaaaacgcgcccacatgaagtaagctcgcaacgtacgcaagttcgaccccaacgcaacgccagcactgagaggaacaccggagccaatgaggatgaacgacttgaccaagaacctcctgctatgggtggtcgtcgccgtcgtgctgatggtggtcttccagagcttctcgccgaagtcctccggggccggcgcgcagggcgcgtcgtactcgcagttcctggaccaggtggacagcggcaacgtgcagaaggtcgccttcggcggcgacatgcgcggcggcaccagccagctgacctacaccacccgcggtgggcagtcgtccaccatcaccgcgccgttcgatcgtgacctgatcaacgtgctgcgcaccaagaacgtggagatcgtgcaggaggagccgtccagcggcatttccctgggcgcgatcctgatgaatttcctgccggtcatcctgatcatcggcttctggctgttcatcatgcgccagatgcagggcggtggcggcggtgccaagggcgcgatgtccttcggcaagtcgcgcgccaagctgcagggcgaggaccagatcaaggtcaccttcgccgacgtcgccggctgcgacgaggccaaggaagaagtgggcgagctggtcgacttcctgcgcgacccgtccaagttcaccaagctgggcggcaagattccgcgcggcgtgctgatggtgggcccgccgggtaccggcaagacgctgctggccaaggccattgccggcgaagccaaggtgccgttcttctcgatctccggttcggacttcgtggaaatgttcgtcggcgtgggcgccagccgcgtgcgtgacatgttcgagcaggccaagaagcacgccccgtgcatcatcttcatcgacgaaatcgacgccgtcggtcgccaccgtggcgccggcctgggcggcggtcatgacgagcgcgagcagaccctgaaccagctgctggtcgagatggacggttttgaaggcggcgaaggcgtgatcgtgatcgcggcgaccaaccgtccggacgtgctggatccggcgctgctgcgtccgggccgtttcgaccgccaggtggtggtcggcctgccggacgtgaagggccgcgagcacatcctgaaggtccatatgcgcaagctgccgctggccgacgatgtcgagccgatggtgatcgcacgtggtaccccgggcttctccggcgccgacctggccaacctctgcaacgaggcggccctgttcgccgcgcgcggcaacgagaaggaagtccgcatggaccacttcgaccgtgcccgcgacaagatcctgatgggtgccgagcgccgctcgatggccatgagcgaggacgagaagaccctgaccgcgtaccacgaagcgggtcacgccatcgtcggccgcctggtgcccgagcacgatccggtctacaaggtcaccatcattccgcgcggccgtgcgctgggcgtgacgatgtacctgccggaaggcgacaagtactcaatgaaccgcgtggcgatccagtcgcagctgtgctccctgtacggcggccgtgtcgccgaagagctgatcttcggcgaggacaaggtcaccaccggcgcctccaacgacatcgagcgcgcaaccaagatggcccgcaacatggtcaccaagtggggcctgtcggagcagctcggcccgatcgcgtatggcgaagaggacgacgaggtgttcctggggcgttcggtcacccagcacaagagcgtgtccaacgacacggcgcgccggatcgacgaggaagtgcgcaacatcctcgacaaggcctatgcccgcaccacccagctgttgaccgagaacatcgacaagctgcatgcgatgtcgcagttgctgctgcagtacgagaccatcgacgcaccgcagatcgacgccatcatggaaggccgcgatccgccgccgccggcgggctggagcaagtcgaacaaggacggtggcaacgacaagggcggcgacgcccgcccgctgccgccgatcgcaggcccggccgaatcgcattgacggcccgctgcacgtaacgccagacgaggccggggaaacccggccttgtcgtttccgggccttcggccccttccgaaccgaactgatgctggagcctgcatgtccgccccgaagcccgaaccgatttcccacaccgccgaaatgatcatcgccaccgtggtcggcgtgggcgtagggctgggcgccgacaacctgctgctgggctgcgtggtgggtatcggtgtcggcatcgtgctgagcatcgccagaaccctgtacgtggaccgcaagcgccgccgccgttgaggggtgtccgcagggcttcgccctgcacccgcggtagtgccggccgctggccggcaacctcagcagcaacagcaacagctgcattccgcgatttggtggggcggtgtcggagggcggggacgccgtgaacccatccatggggacttggcagccgcatccatgcggctgacaccccgccctccgacaccgccccacctctgacagattccggccgctgttggtaggtgtcgaccttggtcgacacggtagatccacgccatgcgtggatgaatctctgtcagatatcgaatcaattcggggtcagatccgttttccgtaggaaaacggatctgaccccacgccatccctcagtacacctgctgttgcttcggctgttgcttcggctgttgctgtagcccgggcctctgcgggtgcagggcgccgccctgccgaactaaactacccgccgtcgtccctgcaggattgcccatgttcgatacctcgccccagctcgattgcgccggccgcatcctgcgcctcgaccgtgcccgggtcatgggcatcgtcaacgtcaccccggactccttctccgatggcggcgcgcatgacaccaccgaggctgcggtcgcccatggcctgaagctggtcgaggagggcgccgacctgctcgatatcggcggcgaatcgacccgcccgggcgctgcgccggtctcggtcgaggaggaactgcgccgggtgattccggtgatcgagcagctggccgcccgcacccgggtgccgatcagcatcgataccttcaagccggaggtgatgcgcgcggcggtggccgctggcgccggcatgatcaacgacatcttcgccctgcgccagggcggtgcgcttgaagctgccgccgaaaccggcgtgccggtggtgctgatgcacatgcagggcgagccgggccacatgcaggccgatccgcactacgacgacgtggtcgccgaggtgcatggtttcctggtgcagcgcctgttcgctgccgagatggcgggcatcgcgaagaagaacctgctgatcgaccttggttttggcttcggcaagagcaccgcccacaacatgaccctgctggcgcgttcggagcgcttcctggaactgggggtgccggtgctggccggcctgtcacgcaagcgcagcttgggagaactcactggccgcgacacgccctccgaacgcgtggcggcttcggtggccgcgcacctgatcgcggtccagcgtggcgcgcgcatcgtgcgcgtgcatgacgtggcggccaccgtcgatgcgctgaagatctggcaggcagtggaggccgtgccgacgccgcgtgccgacgctgcgccgatgatccgctggccggacgaagactgatgggcgtcgatcggcggccgctggcgatcgccgtgatggggccgaccgccagtggcaagaccgccaccgcaatcgctttggcacagcaactggacggcgaaatcgtcagcgtcgattcggcgctggtataccgccacctggacatcggctcggccaagcctgatgcggccgagcgtgcacaggcgccgcaccatctgctggacctgcgcgatccctggcagacctattcggcggccgagttcgccgccgatgccggccgggtcgtggccgacatcgtggcacgcggcaaaacgccgatcctggcaggtggcacggggctgtacttccgggccctgctgcagggcctgtcgccgatgccggaggccgacccggtgatgcgcgaagcactcagcaccgaggcggccgagcggggctgggcggcattgcacgcagagctggccgaggtcgatccggccgccgccgcacgcatccatgccaccgacccgcaacgcatccagcgggcactggaggtctatcgcctgaccggcacgcccatcactgaatggcagcgccgtccgggcgtagcgccgctgccggtgcgcaccctcaagctgatcctggccccgcgtgaccgcgcggtactgcaccagcgcatcgaggcgcgcttcgacaccatgctggcgcagggcttcctggacgaagtgcgggcactgcgcgcgatgccggaaatggccgccgtggaagccccgttggacctgccggcggtgcgtgcggtcggctatcgccaggcctgggagtacctggacggggagggtgatgccgcccgtttccgtgacaaggcgatcttcgccacccgccagctggccaagcgccagctgacgtggctgcgcggcgagcttgatgcgcgctggttcgacccccatatcgaccaggagcgccttgccggcgcggtgtcggccttcgtcgcacgctgaacccccgccagccgtgtaacatcatcggtcggcgggcggctcgggggccgtggcaaccgtcggcaacccaataagaacaataatcaggagtgtgcaatgtccaaggggcaatcgctgcaggatcctttcttgaacgcactgcggcgcgagcgcgtgccggtttcggtgtacctggtgaacggcatcaagctgcagggcacgatcgagtcgttcgaccagttcgtggtcctgctgcgcaacacggtcagtcagatggtctacaagcacgccatttccacggtggttccggcacgcaacgtgaaggtcggtccgggcggtggttacgtgcagtcgggtgaaggtggtcaggcaggtgatgaagcagacgagtaataccggagcggtgaatgtttgaccgctcgaaaaagggcgaacacgccctgttgatccagccccatttcggcaagctggaagacgatgtgctggaagagttcggtgatctggcccgctcggctggggccagcatcgccgcgacgatcaccgcgcgcctggaccgtccgaatccgtcaaccctgatcggcagcggcaagctggacgagatcaaggccgcggccgatgccagtggcgccgacctgatcctggtcaaccatgcgctgagcccgggtcaggagcgcaacctggaacgcttcctcgagcgccgggtgatcgaccgcaccggtctgatcctggacatctttgcccagcgtgcacacagccacgagggcaagctgcaggtcgagctggcgcagctgcgtcacttggctacgcgattggttcgcggctggacccacctggagcgccagcgcggcggttcgatcgacctgcggggcccgggtgaaacccagctggaaaccgaccgccgcctgttgcagaagcgggtcgagcagctgcagaagcgcctggagaaggttgaagtgcagcgcacccagatgcgccgtgcgcgtgtgcgcagcgagctgccgcgcgtggccctggtgggctacaccaacgccggcaaatcgaccctgttcaacgccatgaccggcgccgaggcctatgccgccgaccagctgttcgccacgctggacccgaccgtgcgccgcatcgcggtcccgggcggcagcgtggtgctggccgacaccgtcggtttcgtccgcgacctgccgcatgatctggtcgccgcgttccgctcgacgctgtccgaggcacgcgaggccgatttcctgctgcatgtggtcgacgccgccgatccgcaccgcgaggagcgcatcgcccaggtggacgaggtgctgaccgcggtcggtgccggtgacctgccgcagctgctggtgttcaacaagatcgatcgcatcgacggtgccgacgtccgccacgatggccaggatggcgtgcccgacgagtcgcgtcgtgaacgtgtctggatttccgcgcgtgacgggcagggccttgagctgctgcaggcagtgctgggcaagcgcctgggcctgcagcacgtgaccggtgaattgcgcctgccgccggatgccggccgcctgcgtgcgcgcctgcaccagctggaagtgatccgcagcgaacaggccgatgaagagggctggctgctgcaggtggacctgccgattgccgaagccgagaagctggccgccggtgccgatggcgcgccgatccgggcgctgttgccggagaaactgccggagtggtgagctagcggcccatggctggtagtgccggccgctggccggcaacgcaatcgtgccggaggggcgcgacatccggctgtcatctgcggtacaacggggttcttcaccccaccgtcatgccgatgtccatccccaccgacgccgatctcaacacccagtccgccgcgctcgggcagcgcctgcaacaggcctcgctgcagctggtcacggccgaaagctgcagtggcggctggatcgccaagtgcatgaccgacatcgccggttcttcggcgttcttcgactgcggcatggtggtctacagctatgaagccaagcagcgcctgctgggcgtgcgtgcgcagacgctggaacagttcggcgcggtcagtcgcgaaaccgttctggagatggtgtccggtgcgctggtcaattccggtgccggcatcgccgtggcggtgaccggtatcgccggccccggcggtggcagtccggacaagccagtcggcagtgtctggatcggctggaagcgccgcggtggctacgcccgcgccgagctgttccagttcgatggcgaccgcgaagccatccgccggcaaaccgtggcggcggcattgcgcggtatcgacgcccagctgtgacatgctgctccggtaaccgtccggagcacgcatgatgtgggaaacgctgggcacggtccgtgacctgggccgactgcaggaaatcgccgttgtcttgatccgctacggcttcggcgacgtggttcggcgcatcggcctggccagcacgctggagcgggcagggcgcctgttgcactggaacgaggaccggcaggagctgctgcggatgaccgcaccggtgcgcgtgcgcagtgcgatgcaggatcttggcccgaccttcgtcaagcttggccaggtgctggcaacgcgcgtcgacctgttgccgccggagtggattgccgagctgtccgaactgcagaacgcggtgccggccctgccgtacgccgagatccgcgggcagctcgaagccgacctgggcgcgtcgccggcggaggtattcgccttccttgacgaaaccccgatggccgccgcctcgctggcgcaggcccatcgcgcccggctgcatgatggtcgtgaggtggtgctgaaggtgcggcgtcccggcatccgtgacgtggtcgaggccgacctgcggctgctggcgcggctggccgagatcgtcgaggcccggttgccggacctgcgtcgctatcgcccggccgaggtcgtgcagcagttcaccgtatcgctgcgccgtgagctggattttgccgccgaatgccgcaatgccgaacgcatcgcccgcaacttcagtggccgtgacgacatactgattccgaaggtgcactggcagtggacctgcgagagcctgaacgtgcaggacttcgtcgacggcattcccggccgcgatctggccggcgtcgatgcggcgggcctggaccggcgcgagctggcgcggcgtggtgccggcatcgtgctgaagatggtgctggaggacggcagcttccacgccgatccacaccccggcaacatcatctacctgcgtgacggccgcatcggcgtgatcgatttcggcatggtcggcgcgctgtccgaagtgcgccgcttccaggtcgcgcaactgctgcacggcctggtcgagcaggacccgcagggcgtggcggacgtgctgctggactgggccggcggcgtggaagtggacgagaaccggctgcagcacgacatcagccagttcgtcgaccagtaccgtggcgtgccgctgaaggatctgcgcatcggcctgatgctgggcgacatcacccagctgctgcgcagctacagcctgaccctgccggccgacctggcactgatgatcaaggccttcctgaccctggaaggcatgggccggcagctggatccggatttcgacatggccagcgccgcccgcccgttcctggagcgcgtggtgctgcagcgttatgcgcccagggcgctgctcaagcgcggccggcgcagcctgttgggcctggtcgacttcgccggcgagttgccgcgcgacctgcgcaagctggtccaggcggcgcgccgtgggcgcctccagctgaaggtggagaccaccgcgctgcagggctttggcgagcaggtgaaccgggccgcgaaccgactggtggtgggcgtgatcacggccgcgctgatcatcggctcgtcgatcgtgatgcacagcgtcggcggggtttccagccgctggttgctggcgctgggcgtgtgcggattcatcggcgccggcttctgcggcgtatggatcctggtttcgatatggagaagcggcaagcacacgtaggcaggtgcacgaagtgcgcctgttgcggttccacaggaaccgcagaatcgcgcagcgattcctgtagagccgagccatgctcggctgctcttgcctgggtcggccccgtcattcgcgcgactgccgagcatgcctcggcccaacaagcccgcaccaccccgatcgccccggcacttgcagttgcgcatattagtagtaatactactaaccatggacctgaccgacacccagcaggcgatcctgcagttgatcgccgagcgtatcgagagcgaaggcgcaccgccgtcgcagactgaaatcgcacgcgcattcggcttcaagggcgtgcgcgcggcccagtaccacctggaagcccttgagcaggccggtgcgatccgtcgcatcccgggtcaggcccgcggcatccgcctggtgcaggcaccgccggtcgagaagctggccgagccgggcctggccgacagcgtgctgcggctgccggtgctgggccgggttgcggccggcctgccgatcggtgccgacatcggctcggacgatttcgtggtgctggaccgggtgttcttctcgccggcgccggactacctgctgaaggtgcagggcgactcgatgatcgatgagggcatcttcgacggtgacctgatcggcgtgcaccgcacccgcgacgcccattccgggcagatcgtggtggcccgcatcgatgacgagatcacggtcaagctgctgaagatcgccaaggatcgcatccgcctgctgccgcgcaatcccgactacaagccgatcgaggtgctgccggatcaggacttcgcgatcgagggcctctattgcggcctgtttcggcccaaccgttgacccgttccgtagcgcattaccccgcggtcttttgtggcgattctctggttccactgaggttggtacggatgtccgataattcttttcagagcgccgggcagaatctcagcctgtgcgatacgtccgacttaaagtgagcccatggcaaagaagacccccaaagacagcacctccaacgacacgacctctgcaaggaccaatccgatggacgagaacaagaagcgcgccctcgctgcagctctgggccagatcgaaaagcagttcggcaagggctcggtgatgcgcatgggcgaccgcgtggtcgagcccgtcgaagccatcccgaccggttcgctgatgctcgacatcgcgctgggcattggtggtctgccaaagggccgtgtcgttgagatctacgggccggaatcctcgggcaagaccaccttgaccctgcaggccatcgccgaatgccagaagatgggcggcaccgcggccttcatcgacgccgagcacgcgctggacccgatctacgccgccaagctgggcgtgaacgtggacgacctgctgctgtcgcagccggacaccggtgagcaggcgctggaaatcgccgacatgctggtccgttcgggttcggtggacatcctggtgatcgactcggttgccgcgctgaccccgaaggccgaaatcgaaggcgagatgggcgaccagctgccaggcctgcaggcccgcctgatgagccaggcgctgcgcaagctgaccggcaacatcaagcgctccaacaccttggtgatcttcatcaaccagctgcgcatgaagatcggcgtgatgatgccgggccagagcccggaaaccaccaccggtggcaacgcgctcaagttctacgcctcggtgcgcctggacatccgccgtatcggcgcgatcaagaagggtgacgagatcatcggtaaccagaccaagatcaaggtcgtcaagaacaagctggcacctccgttcaagcaggtcatcaccgaaatcctgtatggcgaaggcatcagccgtgaaggcgagctgatcgacatgggtgtggatgccaagctggtggagaaggctggcgcctggtacagctacggtgaagaacgcattggccagggcaaggacaacgcccgcggctacctgcgcgacaacccgactgtcgccgccaagctcgaggccgagctgcgcgagaaattccagccggccgaagcggcccgcgaggaaggcgacgacgaaggcgaagacgaataaggcttgctgtggggcagggtggcgccgtcagtgacgtcgccctgtcccgcaggttcgaatcgcccagggatgggctgggcgccacggatggcgccacccttggagtacccatgtccgacgccgaagacattccgaccggccgcaagcgccggccgcgtgagcagacccccgtgcaacgggcgttgggcctgctggtccgccgcgagcactcgcgcaaggaactcacccgcaagctgacctcccgtggcatcgaagacgaagtcgcgcaggccgctgtcgccaagttgaccgaggccggctggcaggacgacacccgttttgccgagaacctggtgaggatgcgcgccaacaccggttatgggccgatccatgtccgcgccgagctggggacccatggcctggacagtgccgcgattgccgcagcgatggacagctacgaaggcgactggcaggaaaacgcccgtgatctggtccgccgacgctttggcgaggccggcccgcaggacctgacgcagcggcgcaaggctgccgatctgctggcccggcggggcttcgacggcgacagcatccgccgcgcgacccgctacgacccggatgactgagactggcggcgccgggcctgataccctttaggttttcggcggtccctcgcgaccctggccaacgcggccggtggtccgggtccgccggcccgcagactgccagcccccaatgaacgcatccgccaaattcacgacatcccagatccgcagcgacttccttgagttcttcaagggtaaaggccacaccatcgtgccgtcggcgccgctggtgccgggcaatgatccgaccctgctgttcaccaactccggcatggtgcagttcaaggacgtgttccttggcgcggaaaagcgcagctacgtgcgcgcggccgacgtgcagcgctgcctgcgcgcgggcggcaagcacaacgacctcgaccaggtcggctacaccgcgcgccaccacactttcttcgaaatgctgggcaactggtcgttcggcgactacttcaagaaggacgcgatcgcctgggcctgggagctgctgacccaggtctggaagctgccggccgaacgcctgctggtcaccgtgtaccagaccgacgacgaagcctacgaactgtggcgcgacatggtcggcgttccggaagagcgcatcgtacgcatcggcgacaacaagggcgcgccgttcgcttcggacaatttctggcagatggccgacaccggtccttgcggcccgtgcaccgagatcttctacgaccacggtgatcatattgccggtggtcccccgggttccccggacgaagacggcgaccgtttcatcgagatctggaacctggtgttcatgcagttcgaccgccagcccgacggcaccctggtgccgctgccggcaccgtgcgtggataccggcatgggcctggagcgcctggcggcgatcctgcagcacgtgcacaccaactatgagatcgacctgttccaggcgctgatccgcaaggcttccgagctgaccggcaccgccgacctggagaacaagtcgctgcgcgtgattgccgaccacatccgtgcctgttcgttcctgatcgtcgatggcgtgctgccgtccaacgaaggccgcggttacgtgctgcgccgtatcatccgccgcgccctgcgccacggctggatgctgggcgtgcgccagccgttcttcagcaagctggtgccgaccctggtcgagcagatgggcgaggcctatccagagctgccggcggcggtggacaccgtcacccgtgcgctgcaggccgaagaagagcgtttcgccgaaaccctcgacgccggcatgaagatcttcgaggacgtggccggcaaggccagcaatggcgtgatcccgggcgttgacgcgttccgcctgtacgacacttatggcttcccgctcgacctgacccaggacatcgcgcgcgagcgcgacctgaccgtcgacatcgccggcttcgatgccgcgatggaacagcagcgcgaaaccgcacgggcggccggcaagttcggcggcggcgtgaccctgccggccgagctggtggcaacgctgagcccgaccctgttcctgggctatgaccgcctgcaggccgacggcctgagcgtgctggccctgctcaaggacggtcgtccggtgcagtcggccgatgccggtgattcggtcatcgtcatcaccaaccagaccccgttctatgccgaatccggcggccaggtcggtgacaccggcgtgctggccggcaacggcgtgcgcctggcggtggaggacacccagaagttcgccggccagttccatggccacgtcggcaccttgtccgaaggcggcctgaaggtcggcgatgtgctgtccggccaggtcgatggcgagcgccgtggcgccaccatcctcaaccactcggccacccacctgctgcacgccgcgctgcgcgaagtgctgggcacccacgtgcagcagaagggctcgctggtcgcgccggaccgcctgcgtttcgacttctcgcacttccagccgatcagcgcggaagagctggcggtgatcgagcgcaaggtcaaccagcaggtgcgtgccaacaacgccgctgaagtgcacaccatggccatgcaggaagcgctggacttcggcgcgatggccctgttcggcgagaagtacggtgagcacgtgcgcgtgctgaagatgggtgactactccaccgagctgtgcggtggcacccacgtcaaccgtaccggcgacatcggtctgttcaagatcacctccgagggcggtgtttccgccggggtgcgccgcatcgaggcggttaccggccagggtgccctggactacgtggacgccgaagaggcccgcctggccgaggccgctgaactgctcggtggcagcgctgccgacgtggtcgagaagatccgtgccctcggccagcgccagaagcagctggaacgcgaactggaggccgtgaaggccaaggtcgccgcgggtgccacggccgacctgtccggccaggccgtcgaggtcgccggcgtgaaggtgctggctgcccgcctggagggcttcgacgccaaggccctgcgtgacgccatggaccgcctgaagcagcagctgggcgacgcggtgatcgtgctggccggtgcccaggacggcaaggccgccctggtcgcgggtgtgaacggcagcgcaatgggcaaagtcaaggccggggaactgttgtcccatatcgccggtcagatcgggggcaagggcggcggacgcccggacctcgcccagggtggtggcgaggacgggcccgcccttgccactgcgctggctgcagtcgtcgaatgggtcagcccccgcctgtgatgaaccctgccgtccccctccttgtaggagcgggacggctgacggtaccattgcgaatcttttccctttgtcgtggtagcgcttcttgacggagcgtcaagccggtgggggatacccttccacacggttccatggagacttacaaaaatgttgatcctgactcgccgcgtcggcgaaaccctgatgatcggtgactcggtgagcgtcaccgtgcttggcgtcaagggtaaccaggtgcgtatcggcatcactgcgccgaaggacgtcgctgtgcatcgcgaagagatctaccagcgcatccagcgtggtgatgaagccggtggcaccggtagcgaaaattctgccgaataacgctttaccttcgcactcgattaacgttatgattcacgccccgctgaggtgcaacgcaccagatgcggagaataccccggagtgatgcccgagtggccgaaggggctcccctgctaagggagtatagggtcaaaagctctatcgagggttcgaatccctctcactccgccagatacaaagaagcgcctgcagatcctcgatctgcaggcgtttttctttatggccggccttcagagccgtatcgtcacgccgacctggaagccccgccccggcaggggcgcgatgtacttcagcggcgagttgtgcggccgcgcttcttcattgagcaggttgctgccattgacgaacacttccacgcctgcgatgtagctgttgcgcactggaagttcgcggctgacctgcaggtcgaccaggttgaatgcgtcgagcggaatttcctcactgacattgcgacccaggtacttctgcgcgtcgtagcaggtgctggacagttgtgccttccagccttcgcgctgccactgcaggttggcgccgtagcggttggtcggcatgttcggcagatactcgccgtcgttgtgggcgcgcagcgaatccgggtggtcggccttgttcttcaccaggtcggcgaaggcagagacgttcaacgtgccatagcggcccaggtccaatgcctgcgacgcgtcgatctcgaagcccttcaccgtggtgtcggtctgcttccagtacttcagcggcaggcggttggcggtctgcaggccggaatagccgagatagaggtagttctcgtaccgcatccggtacgcggtggcggacagctcgaaaccgccgaggtggaacaggccggtcagttccaggttcttcgcgcgctccggttccaggttctggttgccttcttcctgtgtcatcaccgaatagtgcgcgttgctggcatacagctcgttgatctccggggcgcgctgtgaggatgagtaacggaccttggccgcgaacaaggggccgagctcgacgtacgagccgaggctgtagctgttgagccggtagtcgcggtcctgcagtttcgtgttggcggcattccgcgcggtcttgaagcggctgggctgtagtgcgtggtcgacccgttcgtggcgtacgccagcatcgaaggtaacccagccgacgtccagcgtttccttcaggaataccgcattgctgcgggtgtccacgtccggcaggtagcgctgcgagccgctgccggtgacatcacgcgactggtggctgaaaccgaccaggccgctgagcgggccgacgcgttgatggctgagcagcaactcggcctgggtgctctcgaaatcgtagtcgtttgccctggtggtacccagccgctcgcctgaagtgttgtccagcctggacacgcggagttccgcgcgctcgaaccacggcagcggatcacgcagcagggcttccagcgcgtagcgctgctgcttgatcaccacgcctaccggcaggccatcggcatggttggaaccgaacgacaggttctgcatcgagaagcccggcacgccgtactcgctgtccttggcatcgatgctgacaccgacgtagccgcggtcaaagaacagggtcgagccgaaggccacctgcgagttgcgcgcatggctgttgcccagccgatgatggtagtcgggcgtcacatcattgttgatctgcttctgcacgtatgacggcgtgccggcgacataggcaggattgaccgggttgatataagtgcggcgctgccagaccgaggtcgggttgttggtgtagaacgagaattcaccatcggcccagtcaggattctcggtcatgaactggtcgatgtaaggctgcgaggccttgttgtagatctgctgtacgcgtgcttccttctggcagctgtcggccagcgccgagttgacgccgccggtcggcgggaacagtcgggtgttgcagacacgggccttgctgttgccggggatgtcgtagtgcgagatgcgctggcgcgagacctgcaggttggtcgagaggttgcgctggttgttgaagttcatgcggaagccctgcgcatcggcggcattgaagcccttgcgcaggaccagttccatcgactggtccttgtcttccatgctgcgcgagatcaggcccgaatcgatctccacgctgccgccgatcgcattgccgccatagcgcaccgtgtccgaggacttgttgacggtgacgctgcgcacgaacagtggatcgaacggaatgttgatgtcgccgctgatcgcgttcatgccgaggatggactggccgtcctgcaggatctgcacgcggttgccactgaggctgcggatgaccggggcgcccgcgttcggcccgaaggcggtgctctgcacgccggagacgtgttcgagcaggccgccgagggtgcggttctgcgcctgcggattgtcgacggtgacccggctgtcgatgcgcgagggctgggaggcctggacctggagggtggggagggtgggttcgtccgcggcctgggcggtgtggacggcgaacagaatggcagcagcaagcaggtggcgacgcatggcaggactcgtgaaggcgaagtgaaatgttataacgtaactctttgtatcggcaaggacggatgagaccttgccgccagaccgaaatcgcgggggcgcgaatgaggttgccgcgtgttcagcgccccgccttgcgccgggcgccgatgctgtgcacgatccgaggcgctgcgccccacaacgcgtcacgcagaatcttcttcactggaacggagcaacgtatgaagctgttgtccgctgtgttgttgtctgcgctttcactccccgccgttccggcgctggcagtggagacttcgccttcccccctgctggggcgctggtcgctggatatcgccacgtctgcgctacccgaagcgcagcgcccgaagcacgtggtgctcgagttcaaggacgccggtggtggccgctggagctcgcacgtggacatcgtcctgcacgacggcaagaccatgaaatccgacggcacgctggccctggatggcacgcccggcgccctgtccggcacctatggcgcggacaaggccaacctgaaactgcctgcaccgaacacgctggtgatgcagctggtggaccatggcacgccggcctccacccgcatctacaccgtggcggatgaccaggcgacgatgaccgagaccaaggcgttctacggtcatgacggtacgccgatcctgcagaccaacctgttcaagcgcatgccgtagcgatgctgcattcaccacgcccgcagggcaggcgtggtgaatgcaacggccctacacggcggcggccggatcgcgcttgccggtgtcgatgccgtacttgtcgatcgcgtcctgcatccgcgagcgttcgatgcggccttcgtcggccagcgacttcagggccgccagtacgatgaagtggcgatccacttcgaagaacgtgcgcagcgattcacgcgtgtcggaacggccgaagccatcggtccccaatgcggtgaagcggcggtcgttgatgaagggacggatctggtcgctgacgatcttcatgtagtcggtggccaccaccaccgggccttcatgaccctgcaggcactgctgcacgtagggcacgcgcggttcttcggccggatgcagcaggttccagcgctcggcggacagcccgtcgcggcgcagttcggtcaggctggtcgcgctccacacatcgctggcgatgccgaagtcctgctgcagcaggtctgccgcggcttccacttcgcgcaggatcgagccgctgcccatcagctgcacgcgtggctgcaaggcgttgtcggcggctgccggatgcagcaggtacaggcccttcaggatgccggcttcggtgccttcgggcagtgccggctgcgggtagttctcgttgagtacggtgatgtagtagtagatgtcttcctggtcgacatacatgcggcgcaggccgtcgtggatgatcaccgccagttcgtagttgtaggtcgggtcgtaggacacgcagctcggaatcaccgacgacagcacgtggctgtggccgtcatcgtgctgcaggccttcgcccatcagcgtggtgcggcccgacgtggcaccgagcaggaagccgcgggtacgcgcgtcggcagcggcccaggccaggtcaccgacgcgctgcaggccgaacatcgaatagaagatgtagaacggaatcgtggccaggccgtggttgctgtaggcagtgccggcggcgatccatgaacagatcgcaccggattcgttgatgccttcctgcaggatctgaccgtccttggcttccttgtaatagctcagctggccggcatcctgcggggtgtacagctggcccaggtaggagtggatgccgatctggcggaacaggccttccatgccgaaggtgcgcgattcatcgggcacgatcggaatcaccagcttgcccagatccgggtccttcagcagcctggtgaggatgcgcacgaagcccatggtggtggactggccgcgatcgccactgccctgcagctgggtgttgaagatcgacagcggcggcagcggcagcggatccaccttggccaggcgcgccggcagctgcccaccctggatgcggcggcgttcggcgaagtaggcggcctcggcgctgcccggttccgggcgcagatagggcatctcctccagctgctcgtcgctgaccggcaggttgaagcggtcgcggaaggcgcgtactgcatcggcgctcatcttcttcagctggtggttgatgttctggccttcgccggcttcgcccatgccgaaacccttgaccgtcttggccaggatcaccgtcggccggccgcgggtgttcaccgcctgctggtaggcggcgtacaccttctgcggatcgtggccaccacgtgccagcgcccagatgtcgtcatcgctcatgtgcgcgaccagctccagcagctcggggtaacggccgaagaaatgctcgcgcacgtaagcaccgctctgcgacttgaaggtctggtagtcgccatccacgcattccatcatgcgctggcgcagcaggccgctgtggtcgcgggccagcaggtcgtcccagccactgccccagatcagcttgatcacgttccagccggccgcgcggaacgtgccttccagttcctggatgaccttggcgttgccgcgcaccggaccgtccaggcgctgcaggttgcagttgaccacgaatacgatgttgtccagccgctcgcggccggccagcgaaatcgccgccagcgattcgggctggtccatctcgccgtcgccgaggaaggcccagaccttgcggtcctggtgctgcttcaggccgcggtactcgaggtaacgcatgtagcgcgcctggtaggcggcggtcagcgggcccaaccccatcgacacggtggggaactgccagaactccggcatcaggcgcgggtgtggatacgaagacaggccgtcacgaccggcttcgcggcggaagttgtccatccgtgccggatcgatgcgcccttccacgtacgcacggccatagatgcccggcgcggaatggccctggatgtagatcatgtcgccgtcgaaggtgtcggtacggccacggaagaagtggtcgaagcccacgtcgtacagcaccgccgccgactggtaggtggcgatgtgaccgccgacgttggagtgcttgccggcgcgcagcaccatcaccatcgcattccagcggatcatcgcgttcaggcggcgctcgatggccaggtcgcccgggtaggccggctggcgctccggcgggatggtgttgacgtaggcggtccacgcgcgcgcatgcagatcgccgtgccgctgcgcatccagctcgctgagctggtcgatcaggtaatgcgcgcgtggccggccaccggcctgcatcaccgcctccagcgattcacgccactcccgcgtttccagcgggtcggtatcgaagggggtcagggcttggttcatgactgtctccagagggcgccgactctgcctgggcgacaacaccggcagggcgcacagcactggagcggggtcgcaatggcggggccgtgacgcgaagggcgaccgtggcggccaccggggaggcaagcgtaggcctggccccgcggcttcgataggcgggcccggcttgggtctctggcaagcaagggttggcacggtgcgccatatcatgggcgaatgtgccgggcggagagtgcctggcatggccgcctgctgcaacgccactgtcatcgatggtcgtcaccctgcggggctttccagcctcggggtgttggccggccgtgaacagcgtgaggatctgggagaagagctacgcgctgcgccgacggctgctgcgtggcttcttcctgcgtcgcggttctgccagcgaagacgccgaggacctggcgcaggaggtgtacctgcggctgctgcgggccaccggcgagaatgccgcagcgatcgagaacccggaggcctacctgttcacggtcgcggccaacctggcacgcgagcacgcgcgcgcgcgtttgtcgctgccgccgctggaagacgtggatcagctggccgaagtgctgaaaagcgaagaagacatcgagggcgagttcgagcgcgcgcagcgctggaacgatatccgcagcaccatcgcacgtctgccggcgaccacgcgacgggtaatggagctgcattaccgcgacgggctggactgcccggcagtcagccaacagttgcaggtgtcggtgcacatggtgcgcaagcacatcggcaaaggtctggaggcctgcaggaaggcgctgggcgccagggagcacgcatgaaccggaacgcatcgcccatggccgacgacacgctcgcctgcgaggcaatggactggttcctgcgcaatcgcgagggagtgctggacgaggccgagcgggttgcgttcctggactggatgaagcgctcgcccgagcacgtgcgcgcctatatgcacgccctcgcgctgcaccggcaggtcggcgaggcactgcaatcgccgttgccggaagaggcgccggcgccgccacggcaggcggccgccaaagtggtgcctctgttcgatagtgcccccgccgcgccgcacgccgcgccgctgcgccgccacacgcgcgggtgggggatggctgccgcagcctgcatcgccctgctcggcgtgggcctggtcccgcagctgatgcccaccgaacagctgtacagcgccgaccacggtgaactgcgtgacctggtgctgcctgaccggacacaggtgcggctcaacgcggacagccgcctgcgggtacgcatgggctggttcagtcgcaaggcggaactgctgcagggcgaggcgacgttcgacatcgcacgcgaccgccgcccgttcgaggtgcaggtgaacggcctggagatccgggacatcggcacagtcttcgacgtgtcgcgacggctgcagagcacgcgcatcggtgtggtttccggcgaggtcgaggtctggagccagggcgcgggtgcccgccgcctggcccagttggggcagggccgggtggtgcaggtcgacgcgcgcagccatgcggtggagtccttggacatgccactgtcgatgctgctggactggcagcagcgcaaagtgtccttccttgacgaacgcttggacgaagtggctgctgccttcaaccggcacaaccaggtgcaggtgcgcgtgctggacgagggcgcggcatcggcacggttgtccggcagcctcgatgcgcatcgcatcggtgcgctgcaggacttcctcgaacgtgatccgcgcttcgtggtgagccgcgagggcgacacagtgcgggttggcagccgctgaggccgaggtggccgtggactgtcagaaaaaattcatcgaatccgcgttctccactttggtggatgcgggctcttacttgggagaagccgctgccgatccgcgcagcggcgcctgctgccttctctcttccaaggacccgtgatgcgcaagacgctctacctgtcgatcatcctcgccctgtctcccggcagcatgccattggccttcgcggccgccgccgatggcctggaggcgcgtgtgtccacgccgatcgcggcacagccgttggcgcgtgcactggagcagttgtcacgcagttccggggtgcagttcctgtactcggccgatggcgatgcccgcatggccggtgcggtgccgcgcggtgccaccgtcaggcaggcgctggatgcactgctggccggtaccggcctgggctacaccgtggtggatggcaatgtcatcgccatcgatccggcaccggtacgcaacgcgccaaagcccggcgcaccgaagccgcgcgaggccgaggcggtggtggcgccgaccctggacacggtgaaggtgattgccgcgcacgaggtgatcgaccagaagaagacctcaccggtgatcaaggattcggtggtctacgacgaaatggacagctacggcgacgagaccctggccgagagcctgatggccgctccaggcctgagtgcggtggaggatgccggcgagccacgttacgtgacggtgcgcggcgtgcaggccaatctcaactacaccaccatcgatggcatcgcgattgccagcgtgggtggcagtggctccggcgaacgcatgaacaacctgcagctgattcccagcgacatcggcacccgtaccgacatctacaagagcttcagtgcggagcaggcaccggatgcggtcggcggcgtgatcgacatcatcagccgcagtgccttcgaccggtccggcaagtacgtgtttgccgacgtggcaggtatctattccacggccgagaccaacgtcgagcgcagcgctggcggcaaccacgaaaccctgggccacttcggcaagagcgccaagatggtgttctccaaccagttcggcgccgggcaggagttcggcatcgtcgcggtggcacgctatgagcagcgttcgcgcaacagcgtcaagcgctgggtggagtcgaactactactacaacgacgccggcaagtacctcaccgacggcaccaccgggccggatgaggccaagggttggaacgggctgcgtgcgcccggcaatttcagcaccggcacctacaccaacttcatcaccaacttcggcggctcggccaagctggaatggaagccgtcggacgatccgttctacgcatcgctgctgctgtactcgtaccggttctacgagaactcgacgatgaacaagaccgacctgtacggcaacgccaagtttccgatccgcaaccagaccgaggacagcggcaccacccagatcaacagcatctacatcaagaaccgccacgaccgctgggaccgcagcaaccgtggcgccatcgccagcttcaactgggacatcggcgaccgttcgcggctgaccctgcgcggcggccataccgaagagactttccacaacaaccaggtctactggggtgtgcgcgcctacccaagcagcctgttcgtcgactacgagaacgacagccacggtttccccaacgcggtggcggtgtccgattccagcctgctgaccagctcggcgttcaagctcaatccggcgcaggcctatgtctccccgcgcgatgccaaggagagcatcgacaacctgcgcgccgacttcagctacaacatcgacgccgatgcacgtggcttcggcttggccaccggcgccgaataccgtcacctgaagatctggcaggacatcgacttcgactacttcaagagcagcgccacgctcaacgattacctgtatccgggatcgacgctgctgggcagcgtgccgggcttcccgctgatcgacaaccgcaagtggaacgaggaactgctaccgaaactgggcaacaacaatgcggcgtatccgaatgccaacttcaccagtgactacaagtacgtggaggacatcaccaatgcgtacgtgtccgcgcactacgcctgggaccggctgctgctgatcggtggcctgcgctatgaccacacccgcttcgatgcctacagcccgttcagcaatgatggcggcaccacctatacctctgccttccgcaacacgagcggtggctacaacaacctgttgccctcgttgaatgcgacgttcaagctgagcgaggaccagcgcctgcgcttctccgccagccgcacgctgggccggccgacgccgagcaacattgcccaggccaccagcaccagctgtggcgatgacgaggagggcaggggcttctgcaccatcaagcagggcaatgcgaacctgcagccgcgccgttccaccaacatcgaccttgcatgggacctgtacttcaacggcaacaacggcctggtctcggtggcgttgttcgacaaggtaatcaaggacgacatctacaccctgaccaccttcgagaacgtgggcgatacccgttaccgggtgacccaaccgatgaacaccgatgagtccaggctgcgcggcgtcgagttcgcggtggccaaccgcaacctgcaatggggccgccagcgcttcgacatgtacttcaacgccacgcggctggaaggcaggaccaactaccgcatcaccgatggcaccgagcgacgcctggaccggctgctgtaccagccggactggtcgctcaatggttcggtgatctggcgcatgccgtggaagaactcgcaactgcgcctgtccggaacctaccgcagccggatgctggtcgacttcggcgacacccagtggctggattcgtactacgacccgtacatgaccttcaacatggccttcagccacaaggtcagcaggcacgtgacgctgaagtacgaagccaagaacctgttcaacacccagccgacctacagcaccggcccgaacgggcgcttccgtaccgagatcgacgactacggccgcttcttctacttccacatcatctacaactgagggcacagccgtggagacgatcaatcgcaggcgattcctggccctggccggcctgtccgctgccggcgcctggatgggcacggcacgcgcgctggccgcgcaggccgatgccaccacgctgaacccgcgcaacctgctggccaagccgcgctttgccagcacgcccttcaccctgggcgtggcctcgggtgatcccacggccgacggcatggtgctgtggacgcggctggcgacggagccgctggtgttcggcggtggcatgccgacccggccgatggtggtcgaatggcagctggcagcggacgaaggcatgcgcaaggtggtacgccagggttcggcgctcgcgcatcccgaactcggccacgcggtgcacgtggaactggaaggattggcgcccggacggccctactggtaccgctttaccgtgggtggccacgccagtgcagtcggttgtacccgcacgctgccggcagccgcggcagcggtggatcgcgtgcgctttgtggtggccggctgccagcactacgaagaaggccactacaccgcgtggcggcgcatcgccgaggaaccgctggatttcgtcttccactacggtgattacatctacgaaggtgaaagccagcctggcctgcggaagatgaacggccagccgttcaccaacctgcgcaaccacgtcggcccgcagacctacacgctggatgattaccgccgccgctatgcccagtacaagagcgatgccgacctgcaggccgcgcatgcgtcggcaccgtggttcgtcactttcgatgaccatgaagtggacaacaactgggccggcgccgaagaccaggacgatacgcccagcgaagtgttcctgctgcggcgcgcacaggcgttccaggcctactacgagaacatgccgctgcgccgttcggcattcccgcgcgatggccacatgcagctgtaccggcgcgcacgctacggaacgctgatggacctgcacctgctcgacacacgccagtaccgcagcaagcaggtgaacatggcgctgcgtgaggacgtggaatcgccggagcgcagcatcgtcggtgcgaagcaggagcgctggctgttcgatggcctggccgatgccgcaccgcgttggcacaccatcgcccaccaggtagcgctgggcaactacatgcgcgagaaggacggcgtggtgcagtcgtccgatgaccaatggtcgggttacctggacagccgtcggcgcctgctcgaccacatccagaaggtcggcttcggcaacgtggtgaccgcctgtggcgacgcgcaccggcattacgccagcgacctggtgcaggaccatcgtgattcgggcgtggtctccagcgagttccttgccacttcgatcacttccggtgctgacggccagggcgtggacgcgtatgccaggaaccagcttgcgcacagccccaatctgaaggcgaccaccgacaagcgtggctacctgctgtgcgatgtcacccatgatgcgtggatcggcgacatgaagacgctggatacggtgatgcgaccgaacggtaccgtgcagagctggaagcgctacgcggtggagcacggccggccggggctgcaggaggcctgaatctagcggtctgcgctgtagagccgagcccacgctcggctgcttctttcggggcaatgcgaccggggcgaaagcagccgagcatgggctcggcactacagggattcttcaatcgtgctcgaaccgcagcggttcggtgcccatcgccgggtcactggtaccgggacgaccatcctcggtgcggccggccaggcgcagggtactgtcgcccgcaccgatgtgcaggtcgtaccagcctgcggtgggcgttgcgtcccacgccaacgtggtctccgcgcgcgccggcagggccatcgtctgctcgggcatgtggccggcataggcgcccgcctgcacacgcacctgctgtgcgctgtcacccagattgcgcaggtgcagccgcagctggccatccgcgcgatcaattgaagcctgcacggcaggagccttggccgcaccctggaagtggcggtggaagccgttcggaccgagcagccacaggtcatagcggccctgggcgtccagcggccaacgctcgcgcagcggcatgcccggcagcagcgtgtaacggcgcggcaccgcctccagccgcagccgatcgtagacatgcagcactgccgctgcgccctcgcaggacaacgccaggtcaacgcccgcgacgtcgaccgcagcaatcgatgcctgcggtcgatagggaagggcacgcgccgggcgtacaccgctttcctgtttcgctggcttcagcccctctggcagcgcgggcacggtgcgccccggcaaagcagcggcgcgtgcggccaccgcgctcacgtcgggcaggccgcggacgaacgggcgggtatcgcgctgggcaaagtcgaacgcagtgctgaggtcgccgcagaccgcgcggcgccacggcgagatgtccggcgcggacacaccaaagcggcgttcgatcagtcgaatgaccgaggtgtggtcgtacacctgcgaatcgacccagccaccgcggctccagggcgagatcacgtacagcggcacgcgcgggcccagtccatacgggcggccgcgcagttcggcgaagtcgtacttctcatctcccggtgccggatggcggtggtactcgccttcagtgctgaccgaggacgcacccgcccagccaccgtccaccggcgaaggcggtgccggtggtggcatgtggtcgaagaaaccgtcgttctcgtcgaacatcagcagcagggcggtgcggctccacacctgcggatcggcggtcagtgcatccagcacgcgcgcggtataggccgcgccctgggccgggctggaggggccgggatgctcgctgcctgccgcgtcggcgatgatgaagctgacctgcggcaggcgtccgtcgatgacgtcctggcgcagctgcgccaggccacgcgtgctgaccccgcgtgcgcgcagctgcgggtcatgccccggcgcagcgcggtaggcctggcggaacgcctcgaagccggccagcgggttgtcggtgaagttgtcggccatgtcctggtagatctgccaggatacccccgccttctgcaggcgttcgacatagctggcccagcggtacgacgcaggatgcccgccgtgctcggtgaagttgtcgtgcgagttggcgatcaccgggccgccggcgcgggcggcagcatcgttgtggccggtccacaggaacacccggttcgggttggttccggcctgcatcgcgcagtggtaggcgtcgcagatggtgaaggcatcggccagggcgaactggaagggcaggtcgctgcgctggaagtagcccatcgagtggttctgcttggctttcggccattgccccatgcgtccgtggtcccaggcccgctgtgcatccggccaggtgtgcggcgtgccttccacgcgcatgtagccgaagtgcgcggcggtatccagcgggaacggcgcgatcgcgcgcttgccgctggcatcgggctgcagccacaggctgcgcgcgcgggcgccggcctgcagtgcctgcgccggagcgacgaagcgatcgccgaaaccccgcacgcccggcagcgtgccgaagtagtggtcgaacgaacggttctcctgcatgaacaccacgatgtgctgcaggtcttccaggctgcgggtccgcgcggcgggggcgatcgcggcggcccgggcgatgctgggcagcagcggggaaaggccggcggcaacgccggcctgcaacaaccggcgtcggccgatatcggtcacgggctcactcacaggtccacacggaaggagatgccgacggtgcgcggagcgccgatgaaggcgttgtcgcggccgtccacccccgcaagataccgcttgtcggtgaggttgctcaccaccaggttggcacccatgcccttcaggcgcggcgacaggccctgcaggtcgaagccgatgttcgcgttgaacacggtggccgagggcagcttgttgacgttggcggcgtcgaggtagcgggtgcccaggtaacggccggacaggccgaagttccagttctcgccctgccagtccgccgagagtacgagggtctgttcgggttggccgatcaccttggcgccgtcgacgatgcccagctgggtatcacgcgcggcatcgccactgcccaggtacttggagcggttgtaggtataggcggcgttgaggcgccagccgttgtcccagccatagccgaacgctgcttccaggccgttgctttccacgccgccgaagttctcgtagacgccgtcggtctcgcccaggtagtcgatgccgctgacgaagccggccggcaggtagacgatgcggttgtcgaacttgatgttgtacagcgtgaccgaggcggtcaacggccagcggctgatgcgcatgcccacttcaatgttgtcagcggtctccggctcgacgttgcggaagcgctgcgggtcggtctcgccgagcacgccggaaggaatcgcggcgaagttctgcgagaagccggcgaacagctccatgccttccacgccgggcgcccaggtgaagccggtggacagcagcggatcggacctggagtcggatgtgacgtgctcgctggcaccgatcacgcggcggcgcgactggtcgacgaagaactgcttcacgccgaggcgcgcgctgaacgggccgaagcgggccacgtcctcgacgtagtacatctgttcgtcgaccttgtacttgtcctcgaactgtacccagtacggctggtggtcgaaggcgatgtcctggccgacgttgagcaggcgatgccagtcgcggcgtgccgaacggtccagcttctccacccacaggccgccgcggatcgtgttgtcgactgcgccgaaagtctggcgccattcgccgtcggcggtcacgcccatgcggtcgttgtcgtagtgggtgtggcgatacgactgcgcgcccagcacgttgccggcgtagcagttcggatcgtactcggcggtgaagcccaggcgcgggctgcagctggccaggcgctgcgcggcactgccatcgggattgacgaagaaaatctggccacggttgctgccgccgtacacggtcttgccgccgaggtattccgactccgggcgaccggctccgtcatcgctgacctgcgccagatacggtggcagccagtcgccgcggccttgcatgcggtgcccgtaggcggccaccgaggccttgaagccgttgccaccgtcgaaggccgcgcgcaggtagccgaaggtgttctcgcgcagcgcacgcgagccggaacggtagttctggtccaggtagggaatgccggtgagggtaccgaccaggttgtcgcgatccggattggtcgcgaagcccttcggtgagacgctggtgtactccggctcgtccgcatcgttgtaggacaggtagccggtcagggtccagcgatccagttcggtgatgagcttgccggcgatgtggtcattgctggtcttgccgctgccatcgatccagtcatgcacgcgcgccgacgaggcactgacccaggcgcgggtgtggccgccgagcaggccggtgtcgtagcgcacgtagtacttgcgtgcctcgttgtcaccggtgccgaccacgaagcgtaggcggctgtcctgcagcggatcgctggtgaggaagttgagcgtgccgcccagggcctcgttcgagcgcgaggagatatcggcagtgccctggctgacttccaccgtttccaggtcgagggtgtcgatgtagcggttggccagcgagccgccgccgtaacccgagccaccattgggcaggccgtcgatggtggtgccgatctgctgggtatcacggttggtgacgaagccacgcatgctgatctgcgtgccccacaccgacgagccggtggcatcggcctcgctgaccaccacgccgggcacttcgttgagcgcgtcgttgacactgctcatcacggtctgccggttcagcgtttccgcacgcacggaagtcttggcatagctggtggcctggccgatcacctgcacctggtcgagggtgcgggcctcactgctgcgcgcttcagcggcatcgccctgcggtgcttcggccagggcgtccagtgcgggagcgatcagcagggcaagcagcgagacacggggaaagcgcgcagacgttcgcatcgagaccggaccttcagagcagggaagccccggagtgtcggcagcgccaatgacatcggcatgacgtggcgatgcaggaatcgtgttctgcgacggccggcacccgccgcctgcttcagtaccgtgcgtccttgggcttcgggtcacgcggccagtccttgcccttgttggcgaagtccggccgcggctggttgatgaaatagccggcgatgtccaccgcatcctggtccggcatcacctgctgccccagcggcggtgcgcgggtcactgccggtggcatgttgtgcttgatgaaaccggccgccttgtacaggcgcgccatgccggcaccgatgttgaagctgtggtcgccccacagcggcgggaaggcgatgtcaccgctggcatcgcgtcggccttcgccgttgtcgccatggcaggcggcgcactgcacggcatacagcgcctggccgcggaccgggtccggagtcagcgtgctgtcgatggggccctcactgggcgcggccacttttgcaccctctggcaccgggctgctcagccacgccatgtagtcgagcatcgcgcgcatctgcggtgcgtccttcggcagcggcttgccgttcatcgagcgctgcaggcagccattgatgcgctcggtcagcccgatcaccttgcccgggcgcggcatgtagcgcggataggcaccgccgccggtattgaagtagtggttgccgaacggtcgcttgccctcggccatgtggcacgaattgcagttcagatcgttgccgacgttgtccggaagcaggcgcgcggtctcgttgaggatgcgccggccgagcatcaccgattcggcattgcccagtccggcgatctcctcggcactgggcgcgtggtagtgggcgaccaccttgccctgtgcatcgaggatatcgatcgtactggctacggcggcatccaggcccgggtgcaggtgacgataggcgagggtgcccgcaccggccagcagcaccacggtgatcgcactaccgagcagcaggcgggaacgtttgcgcgaacgcttcatcgtgcggcctcctgcggaacgaagtgcaccggcttgtcacgcaccacccggcgcatgcgtgccacctcgacctcgctcaccgcgctggcctggttgccccagctgctgcggatgaaggtcaggatctgtgccagctgcgcgttcggcagctgctcgaagccgggcatggtgaaggccatgcggtcgtgcggggtgtgcggggtgcgacccccgatcagggtcacctgcaccagcgaactgggatcgtcggcgaacacgatcgagttgcctgccagggcaggatagacgcgtggcatgccgcgcccgtcggcacggtggcaggcctggcagtgctcggcataggccagcgaaccggccacgcgatagtcgccactacgcagcgcggcggtggtggtgtcggtaccaggcgaccactgcgcactgcgtccctcacgcgccggcagctgcttcaggtagcgcgccatggccagcaggtcagcgtcggacaggtactgcgtgctgtgctcgaccacgtcggccatgccaccgaaggctgccgatcgatcggtgcgcccggtgcgcaggaagtcgacgatctcgccctcgctccagctggccaggccggtcgattcattgcgcaggttcttcgcataccagccttccagcaccgagccggacaggaactggcggctgccatcgtcggccatcgccttctcctggaacgccagcccacgtggtgtatgacaggcgccgcagtgggccaggccctcaaccagctcagcgccacgctgctggcccacatccagcgacggatccgggttgaagctgcgcgggcgcgcgaacagcagctgccaccatgccaaaggccagcgcatgttggccggccatggaatcgtgctgtcggcgttgctttgcttcaccggctgcaccgagcccatgaaataggcatacagcgccttgatctcggcatcgctggcgatcacgtacgaggcatacggcatcgccggatacagcggctggccgtcgtggcggatgccgcggcggaccgcgcgttcgaaatcggcgtagtcgtaggcaccaatgccggagtccggatcgggggtgatgttggtcgaatagatcgtgcccatcggcgtctgcatgcccaggccaccggcgaacggcttgccgcccggcgcggtgtggcaggccgcgcagtcggcggcacgtgacaggtagcgcccctgcgcgatcagcgccggatcgtggatgtcgacctgcgcggtctgtcgcggtgcgaaccagtagggcgtgctgcgggcgatgccgtaggcggcggccaccgtggcggccagggcaatggcgagcttgaacgagatgcgcatggcggcactgtgggcactcccgggcgcgcgttcattgatccggatcaatgactgaaccgatacagcttttacaccaaactgaatcgttcctgcgttgtcatcaagccgtcatccgtgcgcgatagatggccggtctattgggcgttaccgtcccaatctgtctgattcacccctatgacgtgatatgaagcgcctgctgctgttgttgctggcgtgcgccggcctgtggctggccgcatgctcatcctcgatcaacgcctcgtccacctcactcgccgatcagctgatcgcgccgggcggcgtgtcgaccctgctcgatcgtccgcgcatcgccgcggccatcgccgaactgcccaaccgccatggcttcgcggcgggccgcgatggcgtgccgatcttctggcgcgtattcgatccgggcgactacggcgcgcgttaccgctacctgccgcagcgccacgagaacggcctgccgctggataccggcctgagcctggccgtgccgcagccgttccgcgcgcaggcgccgcgcggcaccgtggtgctgctgcatgggtggatgatgaacggtgattcgatgctgccatggtcgctgcagctggccgaatccggctaccgcgtggtcacgctcgacctgcgcaaccatggccagtccggcaccggcccgtccggctatggcacctatgagtcggatgacgtggtcgatgtgatcggcgagctgcgcgcgcgcggcgaagtgaccgggcccctgtacctgttcggtgtgtcctatggtgcggccacggcggtgttcaccgccgacaagctgggtgaccaggtcgaaggcgtggtggcgatggaatcgttcgccaatgccggcgtggcgatccgcaccatgatcccgcacctgatggggctgcagccggaaggcctgaaggcgcaggcggtggcgtcgtacgcgcgctggcgctacggcggccaggacatcaaccaggtgatcgccgccgccagccgccgcatcgacgtcgatctggaccgcgtggacgtcgcgcgtgcgttggccgatacccgcgcctgcgtgctgttgctgcacgggcagggcgaccagcacattccggtcagccagggccgcgaactggcccaggccaatccgcgcgcgcactacatcgaaatgcgcggcgaggaccacatcaccctgccgctgcggctggacctgctggcgggcgtggtcgatgactggatggcgcgcgacgagcaccatccgcagagcgcgtgcccggcaccgcagctgccggcccaggctgagtggctggcgcgcagctgagaaaaaggggacggagaaaaaggggacggaggggattaagtcgtttccaggccaggtgtgcgggaaacgacttaatcccctccgtcccctttttctgtcaggccacgcgtcgtgccagtgcgcgggcagacgccgcgacgccgagcagcagcgcggccacgcacaggaaggcgaaaccgaggctggtggcatgcgccagtgcgccgatcgctgccggaccggcgaggatgccggcgtaacccagtgtggtcaccgcggtgatggcgatgctctccggcatcacccgctgctggcccgccatcgagaacagcgccggcacgatgttggcgcagcccagcccgaccagtacgtagccggccaacgccaccgggaacgagggcaccagcgtggccagggtgaagcccgccgcagcggtgatgccgccgatgaccagcgtgcgggtccggccgaggcgctcgacgatgccgtcgccgaacaggcgcatcgcggtcatcgccagggtgaacaacgcaaagccggccccggcctggtcgcgcggtacctgccgcacttccgccaggaacaccgcactccagtccagcattgagccctcggcaaggaacaccacgaaggccagcacgccgatgaacaggaccacgccgtgcggcagcgccaatagcgggccttcgtgcaggatccgttgcggacgccagtgcggtgccgacagcacggcaaccagcagcagcgcggccaccgaaagcagcgcggccagccacagcggcgtgccgaggatcagcagcccggtcatgcagccggcgccgacgaatccaccgatgctgtagaaggcgtggaagccggacatcatcgcgcgcccggcgtcgcgctcgaccgccacggcctgcatgttcaccgtgcagtccatcgcgcccacaccggcgccgaacaagaacagggcggcgcccagcgcaagcggcgagggcgccagtgccagcaatggcagtgccagcagcaacactgcgcagctggccaccagcaggcgccggcagcccagtcgcccggtcagcgcaccggccagtggcatcgccagcagcgagccgagcccgaggcacagcagcacggcgccgaggctggcgtcggacagcccggccttggccttggcgtaggggaccatcggcgcccacgcggcggtggcgaatccgggaatgaagaaggcggcgcgggtggcgtgctgctgggcacgtggggatgaaggcgtcatgcttgatgcgaagctccgggagagctccatgaaatcgttatcaggccaggtcggcaagtgccatgcatgacatcaaacgacgcatacgattgcagtgacccgattgcgtcaccagcgattaacgccacgcacggacagtggctgcacagtcggcattccgccggccgctgccggagacctgtacatgagcacgacaccgaccatcctccttgtccatggattctggggcggggccgcacattgggccaaggtgatcctggaactgcatcgcaacggccacgaccgcgtgcaggcggtggaactgccgcttacctcgctggccgacgacgcaggacgcacccggaaaatgatccggcagatcgacgggccggtgctgttggtcggccactcctacggcggcgcggtgatcagccaggccggtagcgagcccaacgtgaagggcctggtctacatcgctgccttcgcgcctgatgccggcgagagccccggtggcatcacccagcagcacctgccggaggcagcgccgaacctggcaccggacagcgatggctacctgtggctgcgtgcggacaggttccatgagagcttctgccaggacctgagcgccgacgagggccgggtgatggcggtgacccagaaggcgccgttggcgagcaccttcggtgatgcggtcagcgatccggcctggaagcacaagccgagctggtaccagctgtcccgccaggaccgcatgatcgcgccggacaaccagaaggccatggccacgcgcatccagcccaagcgattgctggagctggatgccagccatgcctcgctggcctcgcagccgaaggaagtgaccgcgctgatcctggaggcctgcgccgccatcggcggctgagcctgcgcggcgcgtcgcaccgcacgacaggattccaccttcggcgagatcaccaacccggccacgcaggccaaggtggtacatcgcacccaaccgtattggttgctggatgcgatggcgcgttatgaattcagtgatcgcctgtcggccacgctcaacgtcaacaacctgctggacaagcgctactacacgatcttcagctggtacagcacctacacctggggtgagccgcgcgatgtgcggctggcgatgacgtacaggttctgacgcgggtcctgtagagccgagcccgcgctcggctggctgtcacaccgcagccgagcgtgggctcggctctacggaaatgcgcccgcgatgctttgcggcatcgcgggcgttgtggttacagcggcaggtcgaacaccagcacttcggcgtcgttgccgttttccagggtcagctgcgcttcgtcgctgacctgcagtgcatcaccggcttccagggtgatgccattgacctgcagctggcctcgggcaacctgcacataggcaccacggccattgccgagcgcgtggtgcagcttctggccgccatcgaggatggtggcgaagatgcgggcatcctggtggatgcgcagcgaaccgtcggcgccgtccggcgaagcgatcaggcgcagctggccgcgcttggtctccggggcgaagtgggtctcctcgtaggacggcgtgatgttctcgcggtccgggaagatccagatctgcaggaagtgcacggtctcgtcggccgagtggttgaattcgctgtggctgacaccactgccggcactcatgcgctgcacgtcgccgtagcgcagcaccgagccggtgcccatcgagtccttgtgctccagcgcgccgcccagcacataggaaacgatctccatgttgctgtggctatgggtgccgaagccctggccgccgatcaccttgtcttcgttgatcacccgcagcgggccgaagctgacgtagcgggggtcgtagtagttggcgaaggagaaggtatggcgcgaggacagccagccgtgctcggccaggccacgggtagcgctcttgcggatctgcagcatgatggaatctccttgttcgatggtttcgatggggcggggtgaggcggtagttgccgtgtttccccgttggagagaagtatctgcttgcgcccggggtttgaaaaacggatagttttgacggccatcatcgaaaaattcgaatgctcaagctcagcctcgatgccctgcagatcctggatgccatcgaccgccgcggctcctttgctggcgccggcaaggccctgcacaaggtgccctcgaccatttcctacaccgtggccaagctggaggaggacctcggcgttcagctgttcgaccgggtcggcccgcgtgccgaaccgaccgaggccggacgcgccctgctggacgagggtcggcatctcctgcgtgcggcccgcgagctggagctgcgggtgcgccgggtggcgtcgggctgggagaccgaactgaccctggcggtggactcggtgttcccgacctggctgctgggcccggacatcgccgcgtttcgtgaagcggaggcgccgacccggctgcggctgatcggcgaggccctgtccggcacctgggaggccctgctggaccggcgcgccgacctgctggtcggggcgccgggcgaggggcccagtggcggtggttacgtggtcgagccgctgggcacggtggagttcgtgttcgcggtcgcacccggtcatccgttggccaaggtgccgggcgtgctcggtcgcgagcagctggtcgagcactgcgcgatcgccgtttctgattcggcgcggcggttgctgccgcgcacggtgggcctgttgatggggcaggagatgctgaccgtgcctgacatggccagcaaactgaagctgcaatgcgaaggtgtgggcttcggcttcctgcccgagccgtgcgcgcgcgctgcagtggcgcgtggccagctggtgatccgcgaggtggaggaacacaagccggaggaaacgttctggctggcctggcgcaccggcgaggacggcgcggcactgcggtggtggcgcgagcgcctgcgcaggccggagctgctgtcgcagtggtggcaggcaatggccaaggggtagggtttggcagggctgcgccctgcacccgccgaggccaaagcaacagcaacagcaacagcaacagcaacagcaacagcaacagcaacagcaacagcaacagcaaaagcgtgcattccgtgagatggcggggtgggtccggttgcgggggccgctgcaagtacgtccatgtaagctcggtcgccgcatccatgcggctcacgcccccgcaaccggacccaccccgccttcgacagttttccgcgatctgtcggaacggcgtactgctctggtaggtgtcgaccttggtcgacacggtggatccacgtcatgcgtggttgaattcactcgatatctgacagatgtgtcgaccaaggtcgacacctaccaacagccgcgtgaacctgtcgaaggtggggcggtgtcggagtgcggggtgtcagccgcatgggcccgaggcatgcctcgggcgggttgggcaggacgcccaaccccggtcttgccgtgtgcgcaggaaagcgcacacgagcaagcggctgccaagcctgcatggacgtacttgcggcgtccccgcactccgacaccgccccgccaacccacggaatgcgtgctgttgctgttgtcgttgaggttgccggccagcggccggcactaccaggggtgcagggcgcagccctgccgaaaaacacgcataaaaaaacagcaggccgaggcctgctgtttcggtgtaatggtgcgcccggagagattcgaactcccgaccgcctggttcgtagccaggtactctatccaactgagctacgggcgccaattacataaacttgttgtgctgactgtgtatggtgcgcccggagagattcgaactcccgaccgcctggttcgtagccaggtactctatccaactgagctacgggcgcgcggtacacaatcaaattttactgcatttccagcggcggatgctgaaaacctgtcgagtggtgcgcccggagagattcgaactcccgaccgcctggttcgtagccaggtactctatccaactgagctacgggcgccctgcgacaggagcggaattatgcggatgtcggcgcgtaccgtcaacagttttgtgaaaattttcatccaactgaatgaaaaagcggtccgccacagcgtcaggggccttcagccaggcgaaatgatcggcacgcgtgcccagttcctgccccgacagcacgcgcagctgcgcgtccacattcggcagcttggccagcaatgtctgcatcgatccggtcggtgccaaccagtcgtgttccatcaacaccgcctgcgcgctgccatgcacgcgcgccatctgtgcgtcgaggtcttcgtccatgccggccgcggcatagtggttgttcaggcccacgcgcgcccagtcggcgatcagtccgcgcgcttcggtgccgccgaagccgaggcgccgaccatgcagcacgccctggcgctgtgcgatccacggcaggaagcggtagaccagcggcagcagccagccgcgcggcggtgggaagccacgccagaacggtgagccgctggccgccaaccacaagcggttgaagtgctgcggattgcggccggcatgcacgcaggccagctgaccgccgaggctgtggccaccgatgatccagggcagcgcgccggcctcgtcatccgccgcgacaaggaccgcctggctggtgggcagatcctgttcgagtacctcgcgatagccccagtcctgcgtgcgcgacggccgcagtgagctgctgccattgccgcgccactcgtgcaggtacaccgccacgcccttcgccgccagcgcctgcgccagcggcaggtagtggcgcgcggccacgcccagtgccggcagccacagcaggcgcgcgatgggctgtgcaggcacgcaggcaatcacttcgtagcgatggccatcagcgcactgcacggcgaggacgtccggtgtgaggctcatgcgtgtggtgccgcgccgaagtgatcgagcaccagcacctcgctgcggccgggggcatagccctgctgcaggccgcgtgcaacgtagtcgataccggcttcgcaggcattggccaggctcaagccgttgcacagttgcgcggcgatggccgaggccagcgtgcagccggtgccatgtgcgtccagcggcaggcgggcatggatgaattcttcgctgctgacgccgtcgaagtagcggtcgatcacgcggttgccttcctgcagatggccacctttgagcagcaccgcacctgcacccaggtcgagcagggcggaggccgcccgttcggcgtcgtcgccgttgccgatcttccgtccgaccagcagctctgcttccggcgtgttcggggtgatcagcgtggccagcgggaccagccgctcgcgcatcgcctgcagggcgctgtcttccagcaggcgcgcgccgctggtggcgaccatcaccgggtccagcaccacgtgtggcgggcgatggcgctccaatgcatcggcgacggcattgatcacctcggcgttggccagcatgccgagcttcaccgcgtggatgtcgaagtcgtcgaagcaggcgtccagttgcgcgcgcaggaaatcgatcggcggcacatgcacggcgatgacgccgcgggtgttctgcgcggtcagtgcggcgatcgcggagaggccgtgcacgcgatgcgctgcaaaagccttcaggtcggcctggatgccggcaccgccgccggagtcggagccggcgatggtgagggcggaaacgggagtggtcgggctcatccagcgattgtgccgtggtcaccgtaaaggcggtagcgtcgatgcgggagatgggggccgttagatggggtcagatcccttttccgcaggaaaagggatctgacccccccggagcgccgccctcaatgccgccaacgcgcccactgctggtacagcacataacccagtccggtcaggccggtcagcagggccggggcgagcagggcgtcgtactgccagcgcacgaacagccaggcgccgatcatgccgccggcgaggaagccgctgatgatcaggccgctgagggtcagtcgccgtacctgcagtggcaacccgcgcagcaggtggcccaagccgatgccgaggtcggtgaacatgccgctgaggtgggtggtgcgcaccaccgcgccgctgaaggtggtggccatcgcattctgcaggccgcaggccatggcagcggccagtgcaccccatatctggtgccgttcgaacagcggaatggctaccagcaacagtgctgactccagcgccagcgccacgccgtagcgtcggcccagctgcagggtgctgtcctggatcagcaggccgctgagcattgcgcccagcgagaacgcgatcagcagtccccacaggtgtccgaccgcgcgccagtcaccctgggccagtgccatgccgagctggctggtactgccggtcatgtggctgaccgcctggtgctcgaaaccgaggaagccgaccacgttgaccatgccggccacgcacgagagcgcgaccgcgccgatccagacccaggtgggcaggcgtattcccatcggcggggcccctcagggcccgccgaagccgccgttgaactgcagctcgctgaaggtgttgctggccgggtcgaacaccgcgccccagaactgcgcgccgccatcgcagacgcggatcgcttcgcgggccggattgatgccgctgtcgtcgggcaggtggaaggcattgatgtagatcagccgtcggcctgcgctttcgatgccgacgtactgccggtcaaagtcgagcaccttcggcacctgggcctccagcgaagacagattcgcttccagctggtcgatctgctgccggctgggtgcccagtagccgctgacccgcccggcctcgcggccggggctgggccgcgagcaggtgtcgagcacctgcgcggcgatgatcgggcgggtgaccacccaggactggccggtgcgctcggcggtgggcacactggccgggccgcgcgtagtggtgcaggcgcccagcacggctgcgagggtgattgcagccgtgggcagcagcaggcgggtgcggcggttcacaacacctccgaagcgtaatcggccaggcgcgaacgctcgccacggcgcagggtgatgtgtgcactatgcggccagttcttgaagcgatccaccgcgtaggtcaggcccgaggtggtctcggtcaggtacggggtgtcgatctgctcgacgttgcccaggcagacgatcttggtgccggggccagcgcgggtgatcagcgtcttcatctgcttcggggtgaggttctgcgcctcgtccaggatcaggtagcgcgacaggaacgtgcggccgcgcatgaagttcatcgagcggatcttgatgcggctggccagcaggtcgttggtcgcctggcgcccccacgtgccgccttcctggttgtgcgtgagcacttccaggttgtcggtcagcgcgcccatccacggcgtcatcttctcttcttcggtgccgggcaggaaaccgatgtcctcgccgacgctgaccgtggcgcgggtcatgatgatctcgcggtagcgctgctggtccatcgtctgcgccaggccggcggccagcgccagcagggtcttgccggtgccggcggtacccagcagcgtgacgaagtcgatctccggatccatcagtgcgttgagggcgaagttctgctcgcggttgcgtgcgctgatgccccacacggcgtggctgccgtggcggaaatcatcgaccagcgacagcaccaccttgccgtcaccgaccacgcggctgacgcgcagctcgacttcatcttcgccgggcaggtagacgtactggttcgggtaccactcctcgccgtcctgcgcctggatttcgtaatgggtacggcccttgtcgctccagctgcgcaggtcgtcgccgtggcgcttccagaagtcttccggcagctcggtagcgccggtgtagagcaggctgaaatcgtccagcgcgcggtcgttctcgtagtcctcggacacgatgccggcgatggcggccttgatccgcaggttgatgtccttggagacgaacaccaccggcaggtcgggggtttcttccttcagggccaggatcgcgccgaggatggcgttgtccgggatcaccttgccgaagctcttgccagcgtcgaaatggctggtctggaagcgcagcttgccggcgctctgcttgccgcgcagctgcagcccattcgggcgctgcagcggaatgccgtcggccaggttgtccaggccggaggcctgcaccagctcgttgaggaagcggctcacctggcgggcgttgcggctcgcttcggaggtgcccttcttgccgttgtccagctcctcgatcacctgcatgggcaggtaaacgtcgtgctcctcgaatttgaacagcgcggtcggatcgtgcatcagcacgttggtatccagcacgtagatgcgcttgcctcgggtcatcgtcgattcctggttacggacagggaaaaaccaccacggcctgctgccgggcagggtgatggcagacacagtaggcagtgggactcacttggactgggaggccttcagttcggcgagaacggcatcggcatggccggcgaccttgaccttgcgccaggactgcacgatgcggctgtcgggggaaatcaggaaggtgctgcgttcgatgccacgtacctgcttgccgtacatgttcttcatcttgatcacgtcgaaggcgctgcacagcgcttcgtcgccatcgctgaccagggggaagccgaagccctgcctggcacagaaattgtcgtgcgacttcaccgaatcgcgcgagacgcccagcacgaccgcgccggccttcttgaacttcggcagcagcgcgttgaagtcgatgccttcggtggtgcagccgggagtgctgtccttggggtagaagtacagcaccagccactggccggcatagtcgccgagggtggcctggtcgccaccggacagcgccagcggcagggagagggtggtgctgtccagggtatcgccgttgttcatgaggtccttctgtcgagcctgggttctttccaagacaattgcatgaaacgccacgcgcccgtgagaggcgcgcgaaaaatcaggaattcattcagaacttcatcgggtccatgatcgcgtccaggttcaggtggtcgcagaactcaaggaaatcgtcgcgcagcgcggcgatgtgcatgttggccggcacgccgatggtgacctgtgcactgaacatttccgcaccggtctgcatggcgcggtagcgcgtgctctgcaggttctcgatggtgatgccctggcggtcgaagaagtcggccagctggaacaggatgcccggcttgtcggcggcgatcacttcgacgatgtacggcagcaggttggactgcgcctgcttggcggcggtgcggtaccagaccagcttcaggccctcctcgcgctccagccgggtcagcatcgcctcgagcttggccaccgagtcccaggagccggtggccagggcggtgaccgagacatcgcggccgaccgtggccaggcgtgcgtccaccaggttgcagccgctgtcggcgatgcggcgggtgacggacagcaggggggactccggatgcgtcgtataggcgttgatcaggaggtggttttcgctcggcgcggggcgcggggtggtgtcggtcaaggcgattccgggtaatgcatgcgtgagtctgaatgcccgccagaggcggggatccaccggtgtccagcatacttgcccgtgctttcgcgccgcaagtaacattcaggccgcccccagcctttcgtggcgggcgtttcccttcccagccaagagcagcacgtccttgtccctttccggcctcatcaccgcgctggcgaccccgttccgggccgacggcgccctcgatcccgatggttggcagcgcctgctgcacctgcaactggagggtggcgtccatggcgttgtcgtggctggctcgaccggcgaagcggcgaccctgaccgatgccgagtacgaccagctgctggccagcgccgtcgaacgcatcggcggccgcatcccggtcatggccggcaccggcctgtcgggcaccgccaagaccatcgaacagacccgccgtgccgccgcccttggcgccagccacgcactggtggtcaccccgccgtacgtgcggccgacccaggctggcctgatcgcgcactatcgcgcggtggccgaccagggcgggctgccggtcgtgctgtacaacgtgcccggccgtaccggctgcgacatgcagccggagaccgtggccgaactggccagccaccccaatatcgtcggcatcaaggaagcggtgggtgacaccggccgggtgcaggcgctgctggcgctgcgcagcccgaagttcgccgtgctcagtggcgacgacggcaccgccgcgcgttcgatccgggccggcatcgatggcctgatctcggtcggttccaacgtgcttccgggcgcgtatcgccggatgtgcgagctggctgccgcgcacgaccacgaagccaccgagtcgtgggacgcgcgcctgcatcccttccatgatttctgtggcgtcgaacccaacccgatcccggtcaaggcgctgctgcgccgcatcggcatcggccatgacctgcgcctgccgctgctgccgctgtcggcagcacatcatcccgcggccgaccaccttgccggcgacatcgccgccctcgaagccctttccagccactgaccttccgtcttggtctgacccaggagattcacatgcgtcaatccgtttccactgtccgcgtgctgtcctacgccctgcttgctgtagctgttgcggccggcaccaccggctgcttcaagcgtggcgtcaagggcgactacgccctggccccggaaatgcgcccgctggaagtaccgccggacctgaacctgcccaacgccaccaccgacaacaaggtgccgacactggcctcggccaccaagccggcggcgccggtcgccgcagccccggcggtgggcaacaccggtttcaccattgccggtggcaaggatgaagccttcgccaaggtcggtaccgcactggaaggggtggacggcgtgaccattgccagccgcgcgcagctgctgggctcgtacgacgtggcctacgaaggcagcaacttcctggtccgcgtggtggcggttgatgcaggtgcctacatctccgcggtcgacccgcgtggcctgccggccaccgccgaagcgccggtgaagctgatcgccgcgctgaaggcgaagctggctcagtaagggccgccctggtggaggccgaccttggtcggcgcttccgtgccaaccaaggttggcacctaccggaagacgtgccttggtagaggccgaccttggtcggcgcttttgtgccaaccaaggttggcacctaccgagaacagaaaagggcgccatgggcgcccttttctgttgccgccgcgggcgcttctcagcgctccagcagcttcagcttgtccggcttgccgtcccattcgccggcgtcggcgggcgggtccttgcgcacggtcagcaccggccactccttcgccagctcggcgttgagggcaacgaagccttcctggccggcggggacgtcgtcctcggggaaaatcgcgttgaccgggcactccggctcgcagagggtgcagtcgatgcactcatccgggtcgatcaccaggaagttcgggccttcgtggaagcaatccacggggcacacttccacgcaatcggtgtgtttgcacttgatgcagttttcggtgacgacaaagggcatgggctgggggtggatcgattcctgaacccgccaattctagaacaggttggcccccggtgtcgggatgggacggaaaacgggcgtctggcaggcgcggccgttggcggcacggcagggcgtgtgcgaggctgcgcgacaaccggtcctggtggccgggctcccttcccagcaggatcgtccatgtcccaggccccgtcccgcaccgcctcccacggtggtgaaaacacggcgttcatcgtcctgatcagttgcgtggccacgcttggtggcttcctgttcggcttcgacagtggtgtcatcaacggcacggtcgatggcctgcgccaggccttcaactccagcgaggcggcgctgggtttcgaagttgcctcgatgctgctgggctgcgcgatcggtgcattcctggccggttggttgggcgaccgcctggggcgccgtggtgtcctgatcgtgtccgcgctgatgttcctggtctcggcgctgggcgccggggcggctcacgcgtcctggctgttcatcgcggcccgcgtgctgggcggctttgcggtgggggcggccagcgtgatgtcaccggcctacatcgccgaagtcgcctcggcgcgctatcgcggccggctggccacggtgcagcagatggccatcatctgcggtttgttcgcggccttcctcagcaattacttgctggcccgcgccgccggcgcctcgaccgagccgctgtggctgggccacgaagcctggcgatggatgttctggatgcaggcgctgccctccgcgctgttcctgctgttgctgctggtgattccggaaagcccgcgcttcctggtgctgaagggccgccaggggcaggcgagtgtggtgttgtcgcgactgtacggcgaggccgctgcccgggccaagcaggccgagatcgaagccagcctggcacaggaccagcacaagccgcgcttcggcgacctgcgcagcagggctaccggcaggctgcgcccgatcctctgggtgggcatcggcctggccatgttccagcagctggtcggcatcaacgtggtgttctactacggcgcggtgctgtggcaggcggtgggcttctctgaaagcgacgcactgctgatcaatgtgctgtccggcgcgctgagcatcggcgcctgcctgctcaccgtgctgctgatcgaccgcatcgggcgcaagccgctgctgtgggtcggctcggtcggcatgtcggtggcgctggtgctgatggtggtggcgtttgccagcggcagcctggccggcgggcgcctgcagctgtccgatggcatgggacggctggcgctggtcgccgccaacgtctacgtggtgttcttcaacatgtcctggggcccggtgatgtgggtgatgttgggcgagatgttccccaaccagatccgcggcccggcgctggcggtggcgggtgcggcgcaatggacctcgaacttcgcgatcaccgtgaccttcccgatgctgctggccggcatcggcctggccggcgcctatggcatctacgcggtggcggccatcctctcgatcgtcttcgtggtccgctacgtacgcgagaccaagggcaaggagctggagcagatggaaggctgacggcgactggcttcggttgcgttccgttggcgcctgcttgtccagagtgtgagggggcaggccgccctctccaggacacgcaagagcccatccatggtgctcacggtcctggagagggcggcctgccccctcctgacagtttcatggtgcgtgcggatgcggcgaagcgctggtcggttgttgccgcagctggcgggaaaccgtccagagttgggtggggtcacccagggcaggacccgttggcgccaaggatggcgccatcgagcccccatggatgggttcacggcgtgtcctgccctgggtgaccccaccggctcgagccgattgcagggaggcgccaaagcgaccaacccgaccgcaatcactgcaagcccggaaaacagaaaagcccgcacaaggcgggctttttcggttcctgctgcggcgactggcgctccctaggggactcgaacccctgttttagccttgagagggccacgtcctaaccactagacgaagggagcgtaactgtgtcgctgccgaggcaggagcgctagtatatgcacctcgatgccattgggcaatcccgaaacttcaaccggaagcgccaacatcatttcctctgctacatcaccgttcagcctgcgcgtcatcccgcgcgaccagcacacgatctcccgcaaggacatcagcccgaacgccctgcgcgtgctttaccgcctgcgcgatgccggcttcggcgcctaccttgtcggcggcgcggtgcgcgatctgctggtcaatggccaacccaaggatttcgacgtggccaccgacgccacgcccgagcaggtcaagcagctgttccgcaactgccgcctgatcggccgccggttccgcctcgcccacgtagtgttcggtcgcgaaatcatcgaagtcgccaccttccgtgccaacagcgatgacggcagcggcgaccgcgagatggaaaacggcatgctcgtgcgcgacaacgtgtacggcaccatcgaagacgacgccatccgccgcgacttcacctgcaacgccctgtactacgccatcgaggacttctcggtgcgcgactacaccggtggtttcgaggacgtgcaggcgcgcctgatgaagttgatcggcgacccggtgcagcgctaccaggaagacccggtacgcatgctgcgagcggtgcgcctggcggccaagctcggcttccagatcgaagagggtactgccgcgccgatcccgcacctggccggcctgctcaacgaagccgcgccagcgcgcctgttcgaggaagtgctcaagctgttcctgtccggacacggcgtggccagcttcgaaggccttgagcgttacggcctgctcgacgtgctgttcccggaaagcgccaaggcgctgaaagccaaccgcaccggcgcgctgcgccgcatgctggtcgagggcctggccaataccgatgcgcgggtggccaacgacgaaccggtctcgccggcgttcctgttcgcgctgctgctgtggccggcgttctgccgtgcacaggcgaccctgctcaagcagggcgtggcaccggaagaggcgcagcgccgcgccgccgaccgcgtcaccgtgcagcagttgagcaccatcgcgctgccgcgccgcttctcgctgccgatgcaggaaatctggctgctgcagtcgcgcttcagctcgcgccagcgcaagcgcgtgttccgcaccctgacccatccgcgcttccgtgccgcgttcgatttcctcagcctgcgccaggtggcgtcgtccgagcacgccgccgatgtcgagttctggcgcgaagcgcaggcgcagtccggtcgtgagctggagtcgtcgctggatgcgatgcacagcgaagatggcgatgacgagagcggagcgccgcgcaagcgccgccgtcgccgccgtcgtccgggtgccgcggccggtgcagcgggcgagtaagcgatgacccttgcctggatcggcctcggcgccaacctcggcgacgcggccgccaccgtcggcgcggcgattgccgcgctggacggcctgcccgggacccggctgcgccaggcctcgcggctttacgcaacgccggcctggggcaatgaagaccagccgccgttcgtcaatgcggtggcctcggtcgaaaccaccttgccagccgatgagctgctgcgggccatgctggcgctggagcagcgcttcggtcgcacgcgtgatccggcagtgcactggggtccgcgcgcgctggacctggacctgctgctgtatggtgcgcaggcgctcgaccagcctgggctgaaggtgccgcatccgtacctgcacgagcgtgccttcgtgctggtgccgctggccgaaatcgcgccggaactggcaattcctggccatggacgcgtgcaggatgcagtgatgcgggtcgatgcctgcgggatcgcgccgatagggtgataatgcccgggttatctcccccggttatcagcacatgagcacccacgcagacagcaagccctggaccgttcccgccctggccgaggccaagcgcaatggccagaagctggtcatgttgaccgcctacgacgccggcttcgcccgcaccttcgatgccaacggcgtcgatctgatcctgatcggcgattcgctgggcatggtcgtgcagggtcatgattcgaccctgccggtgaccgtggccgacatggtctaccacacccgggccgtggcccgcgtgctgcagcgtgcgctgctggtggccgacctgccgttcggcgccgatgccaccccggaacgcgcgctggatgcctcgctgcagctgctgcaggccggtgccgagatggtcaagatcgaaggtgccggcttcaaggtcgacatcatccgctacctggtcgagcgcgagattccggtctgcgcgcacctcggcctgaccccgcagtcggtgctgcgactgggcggcttcaagatccagggccgcggcgatgctgcgcgccagctggtggaggacgccagggccgtggccgccgcaggcgccagcatcatggtgcttgaatgcgtgccgaccccggtcgctgccgaagtgaccgctgcggtggatgtgccgaccatcggcattggcgcgggcccgcagtgcgatggccaggtgctggtgctgcacgatttcctcggcctggacagtggccatcgccgtcccaagttcgtcaaggatttccttgccgaaggtggctcggtggccggtgccacccgcgcctttgccgacgcggtgcgcgacggcagcttccccgacgaacagcacgcctacgcccaatgatccagaccttcaacgagctcggcgcgttgcgcgagcagatcgcccagtggaagcgtgagggcctgcgcgtggcgctggtgccgaccatgggcaacctgcatggggggcaccattcgctggtgacgctggcccgccagtacgctgacaaggtggtggcgagcatcttcgtcaatccgacccagttcggccccaacgaggatttcagtcgctacccgcgcacgcccgaggccgacgtggccgggctggagcaggtcggctgcgatgccgtgtggctgcccagcgtggagacgatgtatccgctgggcgtggacaggaccacgcgcatgcacgcgccgggtgtcagtgaagtgctggaaggcgccagccgcccggggcacttcgatggcgtctgcacggtggtggcgcgcctgttcctgcaggtgcagccggacgtggccgtgttcggccgcaaggactaccagcagcttgccgtgatcaggcagatggtggccgagctgtcgttcccgatccagatcgtcggtgctgagatcgtgcgcgacgaggatggcctggccaagagttcgcgcaaccagtacctgagcgacgaacagcgcccggtcgcgaccaccatccaccgcaccctgctgggcatgcgcgagggctacgtggcggggcaggcacgtgatcgcatcgaagccgacgccacggccgcattgcaggcagccgggttccaggtcgactacgcggtgctgcgcaccccggagctggccgagccgaccttcgacggcggtggccgcgtggcgctgattgccgcgcgcctgggaaccacccggttgatcgacaacctggagttctgagttccggcggcgccgcgcgatgcatggggtcagatcccttttccaggggaaaaggcttctgaccccggtttcaccggctacctgaacaggttgccggccgtgatgccccgcgctgcgcgggtgctagaatccgctctttcctttgccgttgcagcgcccccatgcacctgtccctgctcaagaccaagatccatcgcgccaccgtcacccattccgagctgaactacgaaggctcgatcgccatcgatgacaacctgctggctgccaccggcatccgcgagttcgagcaggtgcacatctgggacgtgaccaatggtgcgcgtttctcgacctatgccatccgcgccgaagccggcagcggcgttgtctcgctcaacggtggcgccgcgcgccacgtgcaggtcggtgacatcatcatcatcgccgcgttcgccagcatgaccgagcaggaagctgacagcttcaggccgaagctggtgtacgttgatggcaacaaccagatcacccacaccaacgacacgatcccgacccaggccgcatgacaacgaacaacggattcgactcgctgcattcccacgcccagcgcctgaagggcgcaagcattcccagcctgctcgccgccgaacccggccgtgtacaggagctggcgctgcgggtcggtccgttgtacgtcaatttcgcccggcagaaatacgatgccgcggcgttgcaggcgctgttggcgctggctgccgagcgtgatgtcggtggtgccatcacgcgcctgttccgcggcgaacaggtcaacctgaccgaagggcgcgccgcgctgcataccgcgctgcgcggcgatgtggtcgatgcgccggtggcggccgaggcctatgccaccgcgcgcgcgatccgccagcgcatgggcgtgctggtgcgcgcgctggaagacagtggcgtgaccgatgtggtcagcgtcggcatcggtggttccgaccttggcccgcgcctggtcgccgacgcgctgcgtccggtcagcggtgcgcgcctgcgcgtgcatttcgtctcgaacgtggacggcgccgccatgcagcgcacgctggccacgctggatccggccaagaccgccggcatcctcatctccaagaccttcggtacgcaggaaacgctgctcaacggccagatcctgcacgactggctgggcggcagcgagcgcctgtatgcagtcagcgccaatccggatcgcgccgccaaggccttcgcgatcgccgccgatcgcgtactgccgatgtgggactgggtgggtggccgctattcgctgtggtcggcggtcggtttcccgatcgcgttggcgatcgggttcgagcgctttgagcagctgctggaaggcgccgcacagatggatgcgcatgcgctggatgcaccgctggagcgcaacctgccggtgctgcatggcctgaccgacatctggaaccgcaacctgctgggccatgccacgcatgcggtgatgacctacgaccagcgtctggcgctgctgccggcctacctgcagcagctggtgatggaaagcctgggcaagcgcgtgcagcgtgatggtgcgccggtcaccaccgacaccgtgccggtgtggtggggtggggcaggcaccgatgtgcagcacagcttcttccaggcgctgcaccagggcaccagcgtcgttccggccgacttcatcggctgtgtgcacaacgatgatccctacacgaccaatcaccaggccctgctggccaacctgttggcacagaccgaggcgctggccaatggccagagcagcgatgatccgcaccgcgattacccgggcgggcggccgagcacgctgatcctgctcgacgcgctcaccccgcaggcactgggtgcgctgatcgccatgtacgaacacgccgtgtacgtgcagtcggtgatctggaacatcaacgcgttcgaccagttcggtgtcgagctcggcaagcaactggccagtggcctgctgccggcgctgcagggcgaggatgtggcggttgccgacccgatgacccgcgagatcctggcgcagctgaagcgctgatgctctggtagtgccggccgctgtccggcaaccaggtgatgcttcaatcgttcatgaggttgccggccagcggccggcactaccgcagaagatgggttgccggccagcggccggcactaccgcgtcaccggctcgggtcgcgctccgggcttggccgcttggccagtttgcgctgcagcgagcgccggtgcatgccgagcaggcgcgcggccgctgacacgttgccgccggtctcgtgcatcgcctgctggatgtgttcccactgcaggcggctgatcggcgtcatcgcatcgggcacttccatttcgccatcgtcggccgggccgtcgtcttcctcgccgagggcgcgcaggatcatcggcaccgtggccggcttcggcaggtaatcatccgcacccagcttgatcgcctccaccgcggtggcgatgctggcgtagccggtcaccagcaggatccgcatgtccgcgcgcagcgcgcgcagcggctggatcagtgccaggccggaatcgctgcccagcttcaggtcgatcagcgcgaaggccggtggatgctgccgggccagcgccagcgcactggcggcatcctgtgcggtctgcgtttcaagccccttgcgggccaggctgcgttgcagggtacgcaggtacagctcgtcgtcgtcgaccagcaggcccagggtggaatggtgaaggctcatggggtgtcctcgcgtggggccagcggcaggcggaagccgacgcggctgccggccccctgggccgggcgcatccacatctcgccgtcgaggcgttcgatggtggcatgggacagggccaggccgacgcccatgccctcgctcttgctgctgccgaacagcttgcccggcagcacggcggcacgggcgtcgaagccatggccgtagtcgcggacttcgccgatcaggtcgtcgccttcgatgcgcaggtccaggtccacgcgtggccggccggctttctcgccggcatcggcggcgttgttgagcaggaccatcagcagatggcctacgcccgggtccagcggcagccgcagcggcgcatcatcgttgcggtgcaggtcgatggtcggccgcaccaggcgccattgctcaagcacctgctgtgcgctggaatggctgcggcccggtgcgtcggccgaggccggagcagccagcgccagcacgcgctcccggcactgcaccagcagctcgcgcagggtttccatgtcctcgcgcacttccggctcttcgctgcgctcggccacatcgtcggccagcagggtcatggtcgccagcggcgtgttcagttcatgcgccaccgaggcggcatgggtggccagcgcgacgatgccctcgttgcgggcgaagcgctcgcgcagtgccgacagttccagttcgcgctcccgcagggccagcgccagccgggtggagaaggccagtaccaccgcggcggagatcaggaagttggcgaccacgccccagcgattcaggtcctgcgcgcggaaataaccgtccggcaatggctggccgaagatgccgctggcggcgtagccgagcaggcaggccagtgcgaccgccaatgcccagcgcaggggcagggcgaacgcggccagcgcgatcaggatcaggaacagcgagctgaacgggttggccatgccgccgctccagccgaccatccaggtcaggacgatcacgtccaccaggatgtggccgaacgcggtcagcggtgcggtgtcagccgcgtccggacgcaactgggtatagatgttgaacagggccagcaccgccacgccggcccatagcggcagctgcggcaacggcaggcccagcacccaggtggcaaccaggatggtggcggcctggccgcctacggcaagccagcgcaggctgcacagggtacggagaaacggggcgtcgggaccggtcattcacgctcatcgtatgcgttcacgggcggctgtgcctgcgacaatcggccgcagccgtgccaccggctgaatgcgagtcacccggaatgcgggggcgggcggtagaatgcgcccatgcacgacgccgtcacccgcccgactcctccctccgatgccacctcctggccccgccgccagacccatgccgtgcagatcggcggggtcaccgtaggcggaggcaagccggtcgtggtgcagtcgatgaccaacaccgacacgtccgacgtggcctccagcgtgaagcaggtggccgagctgtggcgggccggttcggaaatggtgcgtttgaccgtcaataccgtggaagccgctgcggcgatcccgcgcatcgtcgacaagctggcgatgatgggcatcgacgtgccgctgatcggtgatttccactacaacggccaccagctgctgaccgccgagccggcatgtgccgaagcgctggccaagtaccgcatcaatccgggcaacgtcggcttcggcaagaagaaggatctgcagttcgctcagttgatcgagttcgcgatccgctacaacaagccggtgcgcatcggtgccaactggggctcgctggaccaggccctggcggcgaagttgatggacgagaacaacctgcgcgagcagccctgggatgccggtcgcgtgctgcgcgaggcgctgatccgttcggcgctggattcggccgagcaggcggtggagctcggcctgccgcgcgatcgcatcgtgctgtcggccaaggtcagtggcgtgcaggagctgatcgcggtgtaccgcgacctggcccagcgctccgattttgccctgcacctgggcctgaccgaggccggtatcggcagcaagggcatcgtcgcctcgtcggcggcgttgggcgtgctgctgcaggaaggcatcggtgacaccatccgcatctcgctgaccccggaaccgggccagtcgcgcacacaggaagtgatcgtcgcccaggaactgctgcagaccaccggccagcgtgccttcacgccgctggtcacggcttgtccgggctgcggccgcaccacctccgagttcttccaggaactggccaaggtggtgcagaaccacgtgcgcgagaagatgccgctgtggaagatccaccatccgggtgcggagaacatgaccctggcggtgatgggctgcatcgtcaatgggccgggtgagtcgcggcacgccaacatcggtatttccctgccgggcaccggtgaaaccccggccgcgcccgtgttcgtcgatggcgagaagaaggtgaccctgcgtggcgagaacatcgcccaggagttcgtcgccctgatcgacgattacgtcgaacacaaatatgtccgaagcgccggataagcctgcgatcctcgctgcgccggagtccgcctccggtttccgccactggatggcccgcaatgcctggcgcctggtgctgctgttcggtggcgtgctgctgccgttggcgggtttcgtcgcgctggccgacgaagtgcacgagtttgaatcgttccatttcgatgcgccgctgctgtggcagatgcatggcctgcactcaccgctgctggaccgcttcttcgtgctcatttccaggctgggctacgaatggttcctgattcccgccgacgtgctgatcatcggcgtgctgctgggctaccggcgttggcgtgaggccaccttcgtggcggtcagcttcgtcggctcggcgctgctgaacatgggcagcaagcatttcttccagcgccagcgccccagcctgtgggaatcgatcgcgccggaatcgacgttcagctttcccagcggccacgcgatgggctcgatgaccctggccgtgaccctggtgctgctggcctggaacacccgctggcgctggccggtgctgctgctggcgcccgcgttcagcctgctggtcagcgtctcccgggtctatctgggcgtgcattatccctccgatatcctggccggatggtgtgccgcgctggtttgggtggtagggtgctatctggtcatgttcagtcgccggcatccttggcgacgtcaggattcgccgccagcgacggccagcgaagcatcatcacagggggattgacgtggatggcccctccggggcgtctacgtaatagatcagttgtttcgttgcagcaggttctgcaagacagggggcaagcacaacgcgcggtactgtgatgcgcaaggcagaatgcccgggtcgcatctcgaacgcgcttgcaggggtatcggcgccctgcctagcttgacctgcaatggccgcattcgaagaggtacgtgaatgacgattcgagtctacctggtggatgaccacgcactggtccgcaccgggatgaagatgatcctgtcgggggagaccgacatcgaggtggtgggcgaagccgagaccggcgaagatgcgctgcgcgacgtccgccagctgctgccggacgtggtgctgtgcgacctgcacctgcccggcgcgagtggcatggaggtgaccgagcgcatcgtccgcagccatcgcaacacccgcgtggtgatcgtgtcggtgctggaagacggtccgctgccgaagcgcttgctggaagccggggctgcgggctacatcggcaagggctgcgatgcacaggagctgctgcgtgcggtgcgcgatgtggccatgggccgtcgctacctgggcaccagcatcgcgcagaacctggccttgtcgaccgttgaaggcaatggctctccattcgacagcctgtcgccgcgcgagctggaagtggcgttgctgctgacccagggcctgcgccaggaagacatcgcgcggcgcctgagcctgagtgcgaagacggtgaacacgcacaaggcgcggctgttcgagaagatggggatccacgacaacatcgcgctggcgcgcatggccagccagtacgggctggtggatccggcacggccgctgtaagggattcggccaacggctgagccctccgcagggccaccgacaggttccgtgcgccgtcactgccgatagaggaaatgtagagccgagcctatgctcggctgctttccggcctgcgggcgcggagccgagcatgggctcggctctacagctgtgtcgggctcagtggccgcgtacgcgcttgatgatcttcgcggcgtcggcggcgctggcgcgcaccttgtcccactgaccgtcggcgatccagctgcccggcaccatccacgaaccgccgatgcagaccacgttcttctgctcgaggtactcggcggcggtgttttcggtgatgccgccggtcgggcacagcttgaggtcggcaaccgggccggccagacccttgatcatcgccagcccccccacggcggtggcagggaacagcttgcacacgcggaagccgcgcgcatacagcgacagcagttcggtcggcgtggccgcacccggcactaccggcagcggtgccgccgccagcgcatcggccagcgccggtggcgtacccggggtcaccaggaagtccgcgcccgcatcgatcgactgctgcatctgctccacggtcagcaccgtgccggcgcccaccaccacgtccggcagctcgcgcttgagcatcgccaatgcttccatcgccactggcgtacgcagcgtcaactcgatcgccggcaggccaccttccagcaacgccgcactgaccgcacgcgcctggtccagcgtatgaatcgtcaccaccggcaggatgcccgccgcacgcaacagctccgccgccttcacctgatgttgttcgatacccatgcttttgcccttgcctttgctcttctagattcagtggccgcagcgcaaatgacgcgccgggaattgtccagggcgctctactgcccaggccgggaagcctgccgcggcttttcgcttcaggcgtcttttgcctcatgcggcgccgccgccgctgcggcatcgtgccccagctcgtactccgcgtcgtattcccacggcccgccatcggccgccgccggcccgcacgaaatcgaaatcgcgccctgatcagccggacccaccacgcgtcggttgatcgcgaacaggttgcggcccaggtcatgcgcggcaggcgccgtgttcggggccagcggacgcgcggcccactcggccgcgtccaccagcacttccagcgtgccggcctcaccatcgaggcggatcatgtcgccctcgcggaccttggccagcggaccaccgcgcgccgcttccggcgtcacatggatcgccgccggaatcttgcccgaggcgccggacaggcggccgtcggtgaccagtgccacgcgccggccctggttctgcagcagccccagcagcggcgcgagcgaatgcagttccggcatgccgttggcacgcgggccctggtaacgcaccaccgccacgaagtgctcgggcagcaggccgccggcatgcagcttgttcagcacctgcggcgcatcgacaaccacggccggtgcttcgatcgtgcggtactgcggcttcaccgccgacagcttgatcagcgacttgcccaggttgccgcgcagcaggcgcaggccgccctggtgctcgaacgggttgtcgacgccacgcaccacttcgtcatcggcgctgtgttgcaggcccggcaggtagaccagctggccgtcgcgcagctgcggctcgcgcgcgtagtcggccatgccgccgcgcgccacgctgaccaggtcaccgtgcatcaggcccgccctgatcagctcgccgaacacgaaggccggtccgcccgcggccgcgaagcggttcacgtcggcctcgccgttcggatagacgcgggccagcagcggaatcagctgcgacagttcgtcgaagtcgtcccaggtcagcacgatgccggcggcacgcgccactgcgatccagtggatggtgtggttggtcgaaccgccggtggccatcagcgcgatgaccgcgttgatgatcgcgcgctcatcgatgatccggcccagcgggcggaagtcgtcgccgagcgcggtgatgtccagtgcacgttcggtggcttcgcgggtgagggcgtcgcgcagcggcgtgcccggattgacgaacgatgcgcccggcagctgcacgcccatcgcttccagcagcacctggttggaattggcggtgccgtagaaggtgcaggtgccggcgccgtggtacgaggcggactcggcttccagcagctcttcgcgggtggcttcgccggcggcatagcgctcgcgcacttccgccttctgcttgttcgggatgcccggggtcatcgggccggccggcacgaacaccgccggcaggtgaccgaaggccagcgcgccgatcagcaggcccggcacgatcttgtcgcacacgccgaggtagacggtggtatcaaacatgtcatggctgaggccgatcgcagtggcctgggcgatcacatcgcgcgagaacagcgacagttccatgccgccgcggccctgggtgacgccgtcgcacatcgccggcacgccgccggccacctgtgcggtggcacccagcccgcgggcgatctcgcggatctgctcgggataggtctcgaacggctggtgcgccgagagcatgtcgttgtaggcggtgatgatgcccaggttcggcgtcacgccgccgcgcaggcggctcttgtcggtaccgccacaggcggcgaatccatgggcgaggttgccgcagctcaggcggctgcggaacgggccttcgcgcagggaggcgtcgatcgcggccaggtaggcggcacgcgaggcggcgctgcggcggatgacacgctcagtgatggcttgcagttgcggatggaggctcattggctaccggcgttcgaggtggcgagaggcaagcggcggcagggcgccgccgccgacatcaatcagcccagtggacgcgcaggcgcgcgccttccaggttgatcgcgttgaggatcggatactgctgggcgtcgttgctgtccaacgcttggcgcagcacctgcagcttctgcttgccgcgcagcagcagcaggcgctgtcggcattggcgcagcccatgcggggtcagcgtgatgcgcagcggccactggttcgcgcccgggcagccggtggcatccagcgcggcatagggcagggtgctttccagtgcgcgggcgaggtccttcgagcccgggaacagcgaggcggtgtggccgtcgttgcccatgcccagtgccaccaggctcggcggctggctgtgctgtgcctgcaggttggcggtgtacacgcattcgggcaggggcttgccgatccgcaccagtggatcgaaatgcgcaccctcggcgcgtttcagcaggtgctcgcgcaccagccaggcattgctgtcgcgatcctgcggcgacagccagcgctcgtcggccaggctcacttccacccggtcccagtgcacgtccaactcggccagcgcctggtagaccggcgccggtgtggtgccgccagacagcaggatgcgggcgcggcccacttcattgatgtcgtggttgagggtgtgcgccatctcggcggcaacggcttcgatccagccatcggcatcgccatggttgatgaactcgatgcggtcgtcgtggaaggtggtggggctcatgcggcaactccaggtgcgtcacgttcggcgtcggcggcataggcggcggcgcccagcagtccggcgtggggatgcatcaccgccaacgagggcacgcgcgccatgatggaagagaaccggcccttgtgctcgaaacgctggcggaaaccggagtgctgcagcgaatcgagcatcttcggggtcagcccgccggtcaggaacacgccgtcccaggcgccctgggtcagcaccagatcgccagcaatggcgccgaacacggcgcagaacacatccacggtgcgcatcgcctgcggatcgccgtgcagggcgcgggcggtcacgtccaccggctgcagctggcccggatcgatgccggccatctcgcacacggcgcgatggatgttgaccaggccggggccgcagatcaggcgctcgttggagacgcggccgaactgctcggacaggatctccaggatgcggatctcttccggggttcccggcgggaagctcacatggccgccttcggtttccagcggatagcaacggccgtggcgcatgatcaggccgccgacgccgagcccggtaccgggcccgatcaccgcgtagttgcgtggctggccgggcttgcccggtacccaggcagccccgccgacctggaccacgtcatcgggctgcagcagcgaaatcgccatcgcctgtgcggcgaagtcgttgatcaggtgcagttcgtcgaacccgagcatggcagcggtgcggctgcgcgagattacccacggatggttggtgatgcgtgcttcgtcaccatccacgcgaccggccacggcgaacacgccgcggcttgccgtggcgccgatctgttccagatggtggcgcgcggcatcacccagcgacgggaactccgccaccgcgtactcgcggatgctgtccttctgcagcggtgcgtccagcgaggtgtcggccagggcgaagcgcgcgttggtgccaccgatgtcggcgaccagcactggctgcgagctggcactcatgccgacgctccgctgtcgggcgcgtccaggtcctgcggcaggaacccgcccgcattgcccgggccccattggccggcggggtagggctccagcggcagcttggcgtccttccaggcgtcggcgacgctgtcgatccaggcccaggccgcacgcacttcgtcatcgcgcacgaacagcgtgtggttgccgttgaaggcatccaggaacaagcgttcgtaagcgatacggcggtgcaggccggtcggcaccgacagttccagctccagcggatgcagctccagcgcgccccattccgggcctgccaggctgctcatcaggcccagttcgatgttttcctgcggctgcagctggaacaccaggcggttcggtgcggcctgcgcgcgctgcgggcgctcgaacagccagtgggtgaccggcttcagcgtgaccaccacgcgggtggtgcgctcgggcaggcgcttgccggtgaccaggtggaacggcacgccgctccagcgccagttgtcgatatgcgcggtgacaccggcgaaggtttccacgtcgctgccttccggcggctggtaggcctgtgccggctggccattgatggtgccggcggtgtagcggccacggatgctgtcacgcgcggcgtgcctggcatcgagcgggcgcagggcgcgcagcaccttgaccttctcgtcgcggatgcgatcggcttccagcgatgccggcggttccatcgccaccatgcacagcagctgcaggatgtggctctgcaccatgtcgcgcagtgcgccggagcgggcgtaataggcatcgcggccatccacgccttcgctttcggccaccaggatgtgcaccgattcgatgtagttgcggttccacaccgcttccagcagcgtgttgccgaagcgcagtgcgatcaggttctgcaccgcggccttgcccaggtagtggtcgaggcggaacacgcggtcctcgtcgatccactggccgatggtgctgatgatttcctcggcgctctcgctgtcgctgccgatcggcttttccagcatcaggcgtgccggcgcggcgagggcgccgcccttggccaggccttcgcaggtggagatgtacaggcccggcgggatggcgaggtagctgacgcacttgcggtgcacgaggtcggcgaccgcggcggcaaccgagtcgacgtcgcgcaggtccacagagcggtagtcgatgcgacgcagcagggcgctgatgtcgtcctgcgtggccatcggcatggcctgctgcaggcgcggccgcaggatgtcatggaaggcttcggtgtcatgcccggacagggccagcgcacggatgcggaagtcctccggcagcaggccgtcgccaagcaggcgaagcagcgaagggaacaggtagcgctgggccagatcacctgtggcaccgaacaggaagagggtgtcgtgcatcgctcgagtttcagatccgggtgacatcgttgtcaatcgcttcatggctgggttcgggggacatccgcgcaactgcctgtccgaggttcgtcaggggcgttctccggggtgccggaagaccgttccattcgaaaccactgcctcggcggaaccttcgttcaaccgccgacgcagatcggtgcgcaccgatcatcggatagtgccacgtgaaaacgtttacatggcagaatgggcaactgtattcgattgcagtgctcgccgtcatgcggcaagcgcgcaatcatcactgccatcgggagggccgaggcagtcccaaaagacagcccggcttcgggcggaccggataggtgatatggcaaaagtgcagttgcagggtgtgcgcaaggtctatgacaacggccaggtcgcggtgaaggacgccagcttcgaggtcgccgatggcgagctgatggtgctggtcggcccgtccggctgtggcaagtcgaccctgctgcggatggtggctggcctggaggagatcagcggcggcacgctgaccatcggtgatcgcgtggtcaacgacgtggcgccgaaggatcgcgacatcgcgatggtgttccagagttatgcgctgtacccgcacatgaccgtggccgagaacctggcctttggcctgaagctgcgcggtcacgacaaggcgaccatcgacaagcgcatcgccgaggcggcgcagacgctgggcctgaccgagatgatggacaagctgcccaaggcgatgtccggtggccagcgccagcgtgtcgcgctgggccgtgcgctggtgcgcgagccggcggtgttcctgctcgacgaaccgctgtccaacctggatgccaagctgcgccacagcgtgcgtaccgagatcgcgcagctgcaccgcaagctgggcaccaccatgatctacgtgacgcacgaccaggtcgaagcgatgaccctgggccagcgcatcgtggtgctgaaggatggcgtcatccagcagatcgatacgccgatggcgctgtacgatcgcccggccaacctgttcgtggccggcttcctcggcagcccggcgatgaacgtgctgcgcggtacgctgcagggcgatgccggtggcgtgaccgtggtcgatggtgagtggcgtgcaccgctgggccaggccaccatcgatccggcctggctgcagaagccgatcgcggtgggcgtgcgtccggagcacctgcagccggcggccgccgacgatgcgcatgcgttcgtcgcacgcattgaaggcatcgaaccggtcggtaacgagatcttcgtcaacctgagcagtggccagcacgcgctgaccatgcgcgtggcgccgcaggcgctgcccgaggtgggcgagcagatccgcgtggcgatccatccgcagggcctgcatttcttcaacccggagaccggcgcgcgcctgtaaggggtagtgccggccgctggccggcaacctcaaccctgcatggttgccggccagcggccggcactaccattcctgcacccacccgtgcaggtccccgcctgcttcagcgggccaggccatccagcaacggcacgcgctgcgcaatggcatcgcccacctgcaggtcagcgtcgctggcctccagtggcagtaccgccagtgccaggtcgccggccacgctggcaatcgtgcccagccccgcgccatcctgctgcacgccatcgccggcctgtgccggtgctgcggtatgcagcaactgcaccgcacgcttggccttgccgaggaagtgggtgcgggcgacgatttcctggccgggatagcagcccttcttcacgctgtagccgttcaggcggtccaggcccagctgttggggggtccacacttcgcgctggccttcttccagccgcggcaggccgtagcgcaggtcggcctggcgccaggccagggcgaaagcggcctcatcggcttcattgccggccgtgaacgcgtcggcgctgccaatgcgcagggtgcgcggcagggcatcgctgcccaggtccagctcccagccgtcgcctgcggtctgcgcaatcgccgcgccgctggcggcctcgggcgcggtgaacgcgccagccgccgccagatcgctgcgcacctgcaccttcaccttgcggcggaacacgaagcgctgcagttgcgacgcaatcgcatcggcatcgccgtcagccagcaccagcatcacgtggtcgtcggccagccgaagcagctggaacaccgccagggtacggcccttggcgctcagccaggcactccactgccagtgctgcaggggcagggcggtgacatcgctgctgaactgggcgtgggcaaagagagccgcatccgggccctgcaggctcagcagctggtggccgggcaggcgcggatatccgacgaaagcagggggcaggttgtcaggcacgtgaacgaggtctaaaatttgtgcgttgcgagaccgaacatgataggccaaacaacccccactcccgacgacgaatctgaagccccgctggtccctgcggcacccgtgcccgtggaacaggaaaaagcggaagaattcggcggccgcggcggacttgatccggtgcggtatggcgattgggagaaaaacggacgctgcatcgatttctgatcagcattgagccaacgcggccgtgtgccgcccagccgagacaacgagcccagcgaatggcgaccagacaacgcccactttccccgcaccttcaggtgtatcgctggcagattcagatggccacctcgatcctgcatcgagccactggcgtctttctgtctgttggtgccctcatcatcgccgccggcctgctggccctgatgatggggcccgagtcctggaactgcttcaccggccatgccggggcctggtatggccgcgtgttcctgttcgcgtggacatggtcgttcgcctatcacctgtgcaatggcatccgccacgtcgtgcaggacttcgccatcggcttcagcatccccgccttcatccgcagcagctggctgtcggtcatcggcagcctggtgatcaccctgctggtgtgggcctatgtgatgttcggaggtgccgcgtgagcaagttccgtaccccgttgaagaacgtgcgcggccttggctcggccaagaccggcaccgagcacttcgtgcaccagcgcctgaccgccgccgcactggtggtgctgggcatctggttcctggtcttcgtgctgggcctgctgggctcggactacgccaccgccgccgccgccgtggccaagccgtggaacgcggtgccgctgatcggcctgctgatcgccatgttctggcacgcgcagctcggcatgcaggtcgtgctggaagactacatccacgaatcgctgctggccctggtgctgcagaccgcggtgaagttcgtcgccgtgctcggcatgatcgtcagtgtgtttgcggtgggccgcatcgccctcggcgttgcctgagcccaggcacctacacaggaatccagattagatgtccgcttacaagatcaccgaacacaagtacgacatggtcgtggtcggcgccggcggtgccggcctgcgcgccacgttcggcctggccgccaagggcctgcagaccgtgtgcctgaccaaggtcttcccgacccgttctcacaccgttgccgcccagggcggtatctcggccgcgctcggcaacatgggcgaggacgactggcgctaccacttcttcgacaccatcaaggggtcggactggctgggcgaccaggacgccatcgagtacatgtgccgtgaggccatcccggccatcatcgagctcgaacattacggcgtgccgttctcgcgcaccgccgaaggcaagatctaccagcgtccgttcggtggcatgaccaccaagtatggcgaaggcccggcggcgcagcgtacctgcgcggcggccgaccgtaccggccacgcgatgctgcacacgctgtaccagcagtcgctgaagcacgacgcgcgcttcatgatcgagtacttcgcgctcgacctgatcttcgacgaggaaggcgcctgccgcggcgtgctggccctggacatgtccgacggcaccctgcacctgttccgcgcccagggcgtggtactggccaccggcggctacggccgtgcctacttcagcgccacctcggcgcacacctgcaccggcgacggtggcggcctggccatgcgtgccggcatcgccatgcaggacatggagttcgtgcagttccacccgaccggcatctacggcgccggctgcctgatcaccgagggtgtccgcggtgaaggtggcatcctgcgcaacagcagcggcgagcgcttcatggagcgttacgcgccgcactacaaggacctggcctcgcgcgacgtggtcagccgttcgatgaccatcgagatccgcgaaggccgcggcgtcggcgagcacaaggaccacatcctgctcgacctgacccacctcggcccgggcgtgatcgacgagaagctgccgggcatcgccgagagcgcccgcatcttcgccggcgtcgacgtgcacaagcagccgattccggtcatcccgaccgtgcactacaacatgggcggcatcccgaccaattaccacggcgaagtggtgcagaaggtcggcgacaacgacaatgccgtggtgccgggcctgtacgccatcggcgaagcggcctgcgtgtccgtgcacggcgccaaccgcctgggctcgaactcgctgctggacctggtggtgttcggccgtgctgtggccaaccgctgcgccgagaccatcaagccgggcgccgcgcacaagccgctgccggccgatgcctgcgacaaggcgctggggctgctggacaagctgcgccacgccaacggcgataccccgacctcggtcatccgcgatcgcatgcagcgcaccatgcaggccgacgcggcggtcttccgcaccagccagacgctgaaggaaggctgcgagaagatggacaagatcttcgactcgttccaggacgtgaaggtctccgaccgttcgctggtgtggaactcggacctgatcgagacctacgagctgaacaacctgctgctcaatgcggtggcgacgatcaactcggccgaacagcgcaaggaaagccgcggcgcgcatgcgcacgaggacttcccggaccgcgacgacgtcaactggcagaagcacaccctggtcagcgtcgacgagaagggcaagtgcagcttcgactaccgtccggtgcacatgtacacgttgaccgacgacgtgtccgtggtgccgccgaagccgcgcgtgtactgatccgaccccgcctaccatgcaatccgcgcccacgggcgcgggccgcctgagccaacgagagcagccatggccgagttttcactccccaagaattccaagatcacgaagggcaagcacttccccgtcaagaacggcggcaagaacgtgcgcaccttcaagatctaccgctggagtcctgacgacgacagcaacccgcgcaccgatacctatgaagtcgatctggacgcctgtggcccgatggtcctggacgccctgatcaagatcaagaacgagatcgacccgaccctgaccttccgccgctcgtgccgcgaaggtatctgtggttcgtgcgccatgaacatcgacggcaccaacaccctggcctgcacccgagccatctcggactgcggcaagaaggaagtgccgatctacccgctgccgcacatgaacgtggtcaaggacctggttccggacctgacccacttctacgcgcagtacgcgtcgatcaagccgtggatccgcacccagaccccggcacctccggaccgcgagcgcctgcagtcgccggaagaccgcaagaagctggacggcctgtacgagtgcatcctgtgcgcctgctgctcgaccagctgcccgagctactggtggaacggcgagcgttacctcggcccggcgatcctgctgcaggcctaccgctggatcatcgactcgcgcgatgaggacaccggtgcgcgcctggacgatctggaagatccgttcaagctgtaccgctgccacaccatcatgaactgcgcccggacctgcccgaagggcctgaacccggcactggcgatcgccgagatcaagaagctgatgatggaacgccgcgcctgatacacggcgcagggtagttgcatgaccccagtagagccacgccatgcgtggctttgctgtatctggagaaacacgatggaagaagacgttctgctgaagaagctgcgctggcgctgtcgccgcggcatgcgtgagctggaccagctgttcggccgctacctggaccacgagtggagcactgcgccgaccgaagagcgcgaggttttcctgttcctgctcgactgcgaggacgataagttgtggcgctggttcatgggctacgaggcctgcccgcatgcgcacgcgatccccctcatgcagaagatcctcgccctcaagccttgagtggcgcccctcgcggctgcaggccgccgcccagttggcggtgctgctggctgcgccgtggctgctgcgcgcatcggatctgccttcacggctgctgatgcccgcagtggtgctggcctggtgcacgggcctggccgaactggcctggcgccagcgcaggccgcgcgtgcaggtgcttctgccgccgcttcccgagccactgcaggtggccgggcaggacgttgatacgccacggctggtggtgcgtggcccatggctgttgttgctgtggcgtgaggatcggcgccgccagcgcctgctgttctggccggatgtgctcgattccgggcagcgacgtgaactgcgactggccgtggccgcacgcgccgtttcccgtcagccccggacgatggcaccataagctgaattgaccggcgtgcctgcatgttcaaacccattcccgtggccattggcctgcgctacctgcgcgccaagcgccgcaacggcttcatctccttcatctcgatggcatcgatcctgggcatcgcgctcggcgttacggtgctgatcaccacgttggcggtgatgagcggattccagaaggaaatccgcagccgcctgctgcagatgaccgcgcacaccaccatcagccgcgacggcgagccgatgccggactggatgcgcgtcgtcgacgtggcccgcgaggatccgcgcgtggccggtgccgcgccgtacatcgagatccagtcgatgatcagcggcccgcgcgtgcagggtgcgatcatccagggcatcgatccggcgctggagccgaaggtatcggtgatcgacaagaaggtcaccaagggcagctatgccagcctgacgccgggcagcttcaacctgctgctgggcaaggaactggcgatctggctcggcgtcgacgtcggtgaccaggtgctggtgaccttcgccgaagtgcagggcacgcctgccggtgccgtgccgcggatgaaacgcttcaccgtcagcggcatcttcgaggccggctacaacgaggtcgaccggggcgtcggcttcgccaacatgcaggacctggagcgcgtgctgcgcagcgacggcgccaccggcgtgcggctgaagctgcacgacatggaccgctcgctggaagtgggcgtggacctcgcgcagagcctgggtggtgcctaccgcgtgagtgactggacccagcagaacgccaacctctaccactcgctgcgcatggagaaggtggtgatgggcatcctgctgtcgctgatcatcgccatgggtgcgttcaacctggtgtcctcgcaggtgatgctggtgaccgacaagcaggccgacatcgccatcctgcgcaccctcggcctgaccccgggcggggtgatgcaggtgttcatggtgcagggttcgctgatcggcatcttcggcacgctggccggcctgatcggcggcatcaccctgaccctcaacctggaacgcatcctgggcgccatcgaaagcgtgttcaacgtcaagctgctgccggaggatgtgtactacatcaccggcctgccgaccgacatgcagaccggcgacgtggtggcgatcaccgtggtcgcgctgctgatgagcttcctggccaccctgtatcccgcctggcgggcggcacgcacccagccggcggaggccctgcgttatgaataaggtcttcaaccgcggcgatgaggtgatccgcgccgaagcactgggcaagacctacgccgaagggcgcatgcagaccccggtgttcgatggactggacctgaccgtgaccgccggcgaaaccgtggcgatcatcggtgcctccggtgccggcaagagcacgctgctgcacctgctgggcgggttggatattccgaccgcaggcgaggtctacgtgaccggccagcgcatgtccgcgctgtcggacaccgcgcgtggcctgctgcgcaaccaggcgttgggcttcgtctaccagttccaccacctgttgcctgagttcaccgcgctggaaaacgtgatgatgccggtgctgctggccggcactgccgtggccgaagcgagcagccgggccaccacgctgctggaagcggtcggcctcggacatcgcctggaccacaagccgggcgagctgtccggtggtgagcgccagcgtgccgcagtggcccgtgcgctggtcaatcatccggcctgcgtgctcggtgacgagccgaccggcaacctggatgaccgcaccgcgggcaccgtgttcgagctgatgctggaactcaaccgcgcgcgtcataccagcctggtgctggttacccacgaccgcagcctggcgaggcgcctggaccgggtgctggagctgcgcgaaggtcgcctgcacgcgctggcccacgccgacgtctgagcggccggcaacggccgcctcccggcgcctgaacgggtttacctgccctcgcgccggccgcacatcggccggcgcatgatcgcagcaggttccccgaggagatcgccatgaagaccccgatcctgatcgccggactctgcctggcgctggccgcctgcgcgaccaccggccggctcagcagtaccgagaaactggatctgtaccgcgcccacgccggcgcgccgcagaacgacatgcagttcttcggcagcctcaatggctggaccgaactgggtgacagcgcgctggcggtgtggacccggccgagcgaggcttacctgctggaactgagtggtccgtgcccggacctgtcgtacgccaccgccatcgggttgaccagcagcatgggccgcgtgtcatcgcgtttcgacaaggtgctggtgcgcgacccgaccggtggcccgcgcatgccgtgcttcatcaacagcatccgcaagctggacgtgaaggcactgcgtgcctccgagaaggagctgcgccaggcgcaggtgcaggagcgcgaggaaaatacgaaatagcgcggtagtgccggccgctggccggcaacctggcatctgcgcgatgccggccagcggccggcactacctttgggtcaggcttccggggtgaagccggcaggcttttccgcgtccttctcgaacaggaacttgaccagttcgccctcaaggaatgcgcgatgctccggggtgcgcggcgacaggcggttttcgttgatcagcatggtctggtgcgcgagccacgcggcccaggcctgcttgccgatgttgttgaagatgcgctggcccagttcgccggggtagggcacgaagtccaggccctcggcatcgcgttgttcgtactggcagaagacggttcgggacatggtactcactcgtggttgcggggtttcttgggcgttcgtttcggcgccttgaccgtggcgccatcgagcagcttgcggatgggggccggcaggcccagcgcgggcagttcgtcggtggcgacccagcgcagcgtgggttcttccacgcgcaggccgtgcacctgccgcgacagtacctgcaggtgcagcttgtaatggctgaaggtgtgctgcagcacgggcagctcctcggcgtcttccagcgaaccttcgacgtgcgcgtcgaaccagtcctgcagtacgctgccggcctcggcctgcggcagcgtccacagctgcgcccagatgccggtgtccggccgcttctgcagcagcacgcgctgctgggcatcgcgcagcagcagggccacggcttcgcgctcgggcagggtcttgctgggcttgggcgtgggcagttcggcggtacggccttcgcggcgcgccacgcacgcgtcctgcagcgggcagatcacgcaggctggcttggcgcggctgcacaccgtcgcacccaggtccatctgcgcctgggtgtagtcggccatgcgcccggccggcacctgcgccacgtgcgcctcggcaatcgaccacaactgtttctcgatggccggcaggccgggaaagccgtcgatgccgtggtaacggctgagcacgcgcttgacgttgccatcgaggatcgcgaacggatcgttccaggcctggctgaggatcgcacctgcggtgctgcggccgatgccgggcagggcatgcaaggcatcgaaatcgcgcggcaggtcgccgtcgtgcagttccacgcagcgcttcgcggcggcatgcaggttgcgtgcgcgggcgtagtagccgagcccggcccactgcgccatcaccgcgtcattgctggcggcggcgaggtcgggcagcgtcgggaaatgctgcaggaaccgctggaagtacgggatgaccgtggctacctgggtctgctgcagcatgatttccgacagccagacccgataggggctgcgtgggtgctgccagggcaggtcgtggcgaccatggtcgtcgaaccagtgcagcaggcgggcgacgaaaccgtcccgttctgcagtttcggcgctggcgtgcggctggcggggcattggagttccagagaggcagccacccgtggggtggctctaccaggctgcggtagagccacgccatgcgtggctgcgcggtgtatcaggcgcccagcgcttcgggcagcagggcgtcgacgaacgcttccggatcgaacacgcgcaggtcttccgggcgctcgccgataccggcaaagcggatcgggatgccgaactcgcgggccagcgcgaacaccacgccgcccttggcagtgccgtccagcttggtcaccaccaggccggtcacgttcactgcggcattgaactggcgcaactgcgacagcgcgttctggccggtggtgccgtcgatcaccatcagcacttcgtgcggggcggtggggtcgatcttgccgagcacgcggcggatcttgcccagctcgttcatcaggccggactgggtgtgcaggcggccggcggtatcggcgatcagcaccgaggtgccgcgggccttgccggcctgcagcgcgtcgaatgccaccgaagcggcatcggcgttctgcccctgcgcgaccacggctacgccgttgcgctcgccccaggcctgcaactgggccacggcggcggcgcggaaggtatcgccggcagccagcatcaggctgtggccgtcgtccttgaagcgcttggccagcttgccgatggtggtggtcttgccgacgccgttgacgccgacggtgagcaccacgaagggcttggcgttgcgatcgatcaccagcggcttggccaccggctgcaggatcgcgatcagctcggcgcgcaacgcggccagcagcgcattggcgtcggcgaactcgcgcgacttcatgcgcttgcgcaggccctcgaccagatcggtggtggcgcccacgccgacgtcggcggtgatcagtgcggtttccagctcgtccagcagatcgtcgtcgagcttggggttgcgcgagaacagtccaccgaagctgcgcgcgatgacgctgttgcgcaggcgttcgcgccagccgggcttgccggcaggcgccggaacggcatcgatcgaggcggcggcaggcaggtcgtcggtgaccggtgccggggtgggctgaggcagtggtgcaggtgccggttcgatggccagggccgtcaccggggcgacgtcgatccgggcggccggttgcggagcgctcggagcgggaacgaccggagccggaaccaccggggtgggctcgagagcgaccggaacgacggctgccagcggcggctcggccggcgcaggcgcggccggtacggctaccggtgctggctctttgtcctcgaccggcgcggccgacgggaacgccgccgccagctcttcagccgagtagtgctgggtcttgggtgcctctgctgcgggggcatcctggggcttcttgcggcggaaaaaactgagcattggcaaaaggcgctgaaatcagggggatatgctaccactcgggcctgtcgggccgatgtggactcaaggtcgcggcccgccggccgttaaccggtccggagggctgcgtcgtgcggcccggagaccgccatggacaacgtgatgggaattgccctcggcgggatgcgtgcgtcccagcagggcgtgcaggtggctgcgcacaacgtggccaacctggcgaccccggatgcccagcgcctgcagctgcagcgcagtgctgccgggcagggtggggtgcaggccgcggtgattcccgtcggcgccgatgccggcgcgccgctgggtgacctgctggccgcgaaagccgaggtggtggccttcgccgccaatgccgcggtgatccgccgccaggaccagatgctgggttcgctgctggatcgcgacgcctgaaccccttcggcaggcgccaaccgccgcccctggtgggtgccaaccttggttggcactctccacccgcgccggtaggtgccaaccttggctggcacgctcgatccgccccggtaggtgccaaccttggttggcacgcttttggggcgccaaccaaggtcggcctctaccagagcaccgccgggtaagccgggccatgcccggcgaccaccctgtcgatcaggccgacagctccagcagcagcttgttcagcctcgccacgtaggcacccgggtccttcaggctgtcaccggcggccagcgcggcctggtcgaacagcacccggccgaggtcgtcgaaacgcgcgccatcggcttcggcatccagcttggcaatcagtgggtggcccgggttgatttccagcaccggcttgctgtccggcaccttctgcccgctggcttccaggatctggcgcatctgcaggcccaggtcctgttcgccgatggccagtaccgccggcgaatcggtcaggcggtgtgacacgcgcacttcggccacgtcatcgcccagcacggtcttcaggcgctcgaccaggccctgcttgtccttcgccgcggcttcctgttcctgcttgtccgcttcggtttccagcgcgcccaggtcgagatcgccacgagcgatgtcgacgaagcccttgccgtcgaaatcggtcaggtagcccatcagccactcgtcgatgcggtcggtcagcagcagcacttccacgcccttcttgcggaacacttccaggtgggggctgttgcgcacctggctgtagctctcgccggtcaggtagtagatcttgtcctggccttcggtcatgcggccgaggtaatcggccagcgacaccgtctgcgcatcgctgtcgccgcgggtggaggcgaagcgcagcagcccggccaccttctcgcggttgttgtagtcctcggccgggccttccttcagcacttggccgaattccttccagaacgtggcgtattgctccggcttgtcggcggccagcttgtccagcatgtccagcgagcgtttggtcagcgccgccttcatcgaatcgatgaccgggccggactgcaggatctcgcgcgagacgttcagcgacaggtcgttggagtcgaccacgcccttgatgaagcgcaggtacagcggcaggaactgctcggcctggtccatcacgaacacgcgctgcacatagagcttcaggcccttgggcgcatcgcggtggtacaggtcgaacggcgcgcggccgggcacgtaaagcagcgaggtgtactccagcttgccttcgaccttgttgtggctccacgccagcggatcgctgtggtcgtgcgccacgtgcttgtagaactcggtgtactcggcgtcgccgatctcggtgcgcggacgggtccacagcgcgctggcgcggttgacggtctcccactcgacggtggcgccttcttcgccaccttccttcggcatctggatcggcaggccgatgtggtccgaatacttcttgaggatgctgcgcaggcgccagccgtcggcgaagtcgtgctcgccatccttcagatgcaggacgatgcgggtgccgcgctcggccttgtcgacggtggcgacgttgaaatcgccttcgccgcgcgaggtccagcgcacgccttcacctgcggccaggccggcgcggcgcgaggtcacttcgacctcgtcggcaacgatgaaggcgctgtagaagccgacgccgaactggccgatcagctgcgaatccttcttctggtcgccggacagctggcgcaggaaatcgccggtgccggacttggcgatcgtgccgagatgggcaatcgcctcggcgcgactcatgccgatgccgttgtcttcgatggtgatggtgtgggcggtggggtcgaagctgacgcgcacgcgcagttcgctgtcgccttccagcagggccggctgggtcagggcctcgaagcgcagcttgtcggcggcgtcggcggcgttggagaccagctcgcgcaggaagatctccttgttggagtacagcgagtggatcatcagctgcagcagctgcttgacttcggtctggaagccaagggtttcggtctgggtggtctcggtcatcgatagggctccatgtgcaatgccgcgccagcgcgtgcggcctcgccaaggggtatggctgattgtcccgaaatcaaggggttggtcggccgggcggcgcccggcacctgcagaggccgaagcaacagcaacagcaacagcaacagcgggctatccgtgggatggcggggcggtgtgggttggcaggacacgccgtaaacccccctccgggggccggcccagccgctggcggctgtgcgttcgggcgcttgcgaagcagtgcttcgcaagcaaagcgccctcacccatgggggctcgatggcgccatccatggcgccaacggtcctgccaccccacaccgccccgcctctgacagatttcccgcggctgttggtaggtgtcgaccttggtcgacacatctgtcagacatcgaaataaatctggggtcagatccgttttctgcaggaaaacggatctgaccccaagagccgttccgacagatcgcaggaaactgtcgaaggcggggtgggtccggttgagggggcgtgagccgcatggatgcggcgaccgagcttacatggacgtacttgcagcgtccccctcaaccggacccgccccgccatcccacggggatgcccgctgttgctgttgcttcggcttctgcgggtgccgggcgccgcccggccgaactacaatcccgctcatgctgaatttctcgaattcctcccgccgggggcgccgatgagcggccgcggtggtaatgacggccaggtccgcatcatcggcgggcgctggcgcaatacccggctgccggtgccgaccctgccgggccttcgccccagcagcgaccgcgtgcgcgaaaccctgttcaactggctgatgcccaagctcggcggggcccgcgtgctggacctgttcgctggcagtggcgcgctgggcctggaggcggtctcgcgtggcgctgcccacgccaccctggtcgagcgcgatgcgcagctgggacgcaacctgaccgccgccgtcgccaggctgcaggccagcgaccagatcaccgtcgtgcaggccgatgccctgcgctggctgcaaggggcgcaggcgcagcaggccgacctggtcttcatcgacccgccgtttgccgatggcctgtggcaggacgtgctggcccagctgccgcggcacctggccgccgacgcctggctgtacctggaatcgccagccggccacgtgccggtgctgccgccggactggctgctgcaccgcgagggtggcacccgcgaggtgcgctttgccctgtaccgccgtgccactgctacactttgacctcatctgaacatctgcatccgcccatgaccgtggccaatcgccgcattgccgtctaccccggcacgttcgaccccatcaccaacggtcatatcgaccttgtgagccgggccgcaccgctgttcgaaaaggtcgtggtcggcgtggcgcagagcccgtccaagggcccggcgctgccgctggagcagcgcgtgcagctggcgcgtggcgcgctggcccaccacggcaacgtcgaggtcatcggcttcgataccctgctggcccatttcgtacgttcggtgcagggcggggtgctgctgcgcggcctgcgcgcggtgtccgacttcgagtacgaattccagatggccagcatgaaccgccacctgatccccgaggtcgagaccctgttcctgaccccggccgagcagcacagcttcatttcgtcctcgctggtccgcgagatcgcgcgcctgggcggcgacgtgtccggtttcgtgccggccgcggtgctcgaagccctgcgcaaggtccgcgaagcgaagtcggcacagtcgtaagccccgctgtacccgcaccccattacgtacaccaccacgcaccattccgggaggaaacccatgaacaccaccatgcgcgcgatgctgatcgcttcgttggccctggcattcaccgcctgcaagaaggaagaggccgctccggtcgacgaggccaagcaggccctggtcgccccggccaaggacgacgatgcaggctggaagaagtacctgcaggaagtggcgatccagaacatgggcaacatcaccaacagcccgttcctgtactacctctcgccggaatcggacccggacttccaggccaagtacgagcgccagaccgaaagcgcgacccaggccgtggcccgtggcgtgcagccgggcaacatgctggccttcggttcgtcggcctcgggcaagatggctgacatgatccaggccgtgttcaaggacgtgtcgccggattcgatgaagggcgtgcgcgtcgtcttcatcggccagtcggccgacaacgcccgcgtgcaggctgcgatccagccgaccggtgccgagtacattttcgtcgaagccaagtaataccgagccatggcggccatgctacggcatggcccgggcggcatcctgcaagggcgccgctgatgacctgaccggcccgcgcgcccgcgctggccggtcctttgtcccagggcgcgggcgaggagtatcgccgtgtcgctgaaaatcaacgagctctgcgtcaactgcgacgtgtgcgagccggcctgccccaaccaggccattgcgatgggtgaaaccatctacgtgatcgaccctgcgcgctgcaccgaatgcgtgggtcatttcgacgagccacagtgcgtggtcgtctgcccggtcgagtgcatcgacccggacccggagatcgtggaaacggaagaccagctgctggccaagctgcgccagctgcagcacgatcaccccgaactctacgcggagcccccatccgaatgaagacgctgatcgtccgcccactgttgctgctcggcctgctgctgagccccatggcctgggctgacagcccggcccgtgccgatcgccctgatggcgcggccattgccagcggccacgcactggccacccaggccggcatcgacatcctggcgcagggcggcaacgccttcgacgctgcagtggcggtgtcgtccacgctggcggtggtcgagccgatcagttccgggttgggcggcggcggcttcttcctgctgcacgacgcggccaccggcaaggatgtgatgctggatgcgcgcgagaccgctccggccgcggcgaccccgcaggccttcctcgacaagcagggcaacctggaccgtgatcgttcggtcaacggtgcctggtcggcgggtattcccggcctgcccgcagcgctggtcgagctgtcggccaagcatggcaagctgccgttgtcggcctcgctgcagccggcgatccgcatcgcgcgcgaaggtttcccggtgtacgaccgcatggccaagggctacgcgtcgcggcgtgaagtgatggagcgctatcccggcacgcgcgaggtctacctgcgcaatggcaagccgatcgccagcggtgacctgttcaagcagccggaactggcgcagacgctggagcgcctggccgcgggtggctttgatggcttctacaagggccagaccggaaagctgttgctggccggcgtgaagcaggctggcggcaagtggaccgctgaagaactggccggttaccgcgtcaagcagcgcgagccgatcgtgttcaactacaacggctggaagatcaccaccgcgccgccgccgtcgtccggtggcatcgcgctggccagcatgctgcagatcctggaaggctgggacatcaggaagatggacccggcccaccgcacccacctggtggtggagtcgatgcgccgcgcctaccgcgaccgcaccttcttcctcggcgatccggacttcgtgcagatcccgcagaaagtgctgaccagcaaggattatgcgcagggcctgcgggcgaccatccatccggagaaggccacgcccagcgacctgctgtcgggcaacccgacgccgctggaagatgacgaaaccacgcacttctcgatcatcgaccgcgacggcaaccgcgtcggcgccacccagaccgtcaacctgctgtatggctcggggctgattcccaagggcaccggcgtgctactgaacaacgagatggacgacttcgcgctgaagccgggcacgcccaatgcgttcggcgtgatgggctatgaggccaatgcgccgaaggccggcaagcgcatgctcagctcgatgacgccgaccttcatggagaacgccgacaaggtcgtggtgctgggcaccccgggtggcagccgcatcatcaccatggtgctgctgggcatcctcggctacgacgacggcctggatgcacagcaggttgccgcgctgccgcgctaccaccaccagtggctgccggacctgatcgaagccgaggacgatgcgttcgacgcggcgacggtgaagcagttgcaggcgatgggccacaagatcgacctgccgggtgacgtcgccgcaggcggccgcggttccagtcacgtgtggggcaacctgcagaccgtggaatgggaccgcaaggcgaacaagctgttcggcggcagcgacccccgcaacccggtgggcagcgcccaggtcgtgccggcacgctgatccggtagcgcctgctgctggccggcaatccggccgattaccgaaaccccgcctttgccggcggggttttctgtttcctttctagcgattatttaacgggccggcgccgataatcgacgcatgaaactctggtctattcgtggaaactcgcagcgcctcgatggcggtgcgatgttcggcaacgcaccgcgtgcgttgtgggaaaaatgggcggcgccggacgagctcaatcgcatcgagctggcctgccgcgcactgcttgccagtccgctggaaggcaagaccgtgctgtttgaaacgggtatcggggcgttcttcgatccgcgcatgcgcgagcgctacggcgtgcaggaaagccagcacgtactgatcgattcgttgcgcgaagccggcttcgagcacgaggatatcgacgtggtggtgctcagccacctgcacttcgatcatgctggcggcctgctggcggcatggagcgaagggcgagagccggaactgctgttccccaatgcgacttatgtggtcggtgcgcagcattggcagcgcgccgtgcagccgcatccgcgcgaccgtgccagcttcattccggaactgccgggcctgctgcaggccagtggccggctggaagtggtggacggggaatactcgaaggcacttggccgcagcgtgcgcttcagctacagcgacgggcatacgccgggactgatgctggccgagatcgtcggtcacgcgcatgccggcgaaagtgcgcatggtggcgtggtgttctgtgccgacctgatcccggggcgctcatgggtacacgtgccgatcaccatgggctacgaccgcaacgccgagctgctgatcgacgagaagcggcagttccttgaagacaagctggcgcgcaacgtgcggctgttcttcacccacgacccgcaggtggcgctggcgcagctgggccgtgatgacaagggacgtttcgtgaccctgcacgaacagggcgagctgaaggcgcgcgccctggggtaatgaaaaggccgggcaatgcccggcctttcactgatggtggcagatccacgccatgcgtggatggcgttcgatccggacgcgacgattatgacgacttcaggcagctgctcatgaaggtcttgcgcgcatcaccggccagcttcttcgcgcccgcgtcagcgttgcacttgcgcatccgttcctgctgcggattgaccgccttggtctcggcggcgtggccgctgaggcaggagctctgcgcggtcttgtaggcatcacccttcaagcccttgttcttggccgagcattcggccatgcgctgctgctgcggggtggcggcgttggcagccaggggcaggccgaccagcaggacggcggccaacaggaaagaggctttcatcgggagctccaagggtggcgggtgcgcggagcatttgcttcgggccggcaaggccacgtgaagaatcacgccagtgccgcgcctgcttgcggcaacgttcagaccggcgtattacttagccatatgggtaagtattatcctgccattgaagacgtcttccaggcactggccgacccgacccgttgcgcgatcgtagcggcgctggggcaggggccgcgcacggtgtcgatgctggccgaacccttcgggatggccttgccctcgctgatgaaacacctagccgtgctggagcgcagcggcgtggtgcgcagccacaagcaggggcgcacacgcacctgcgaactggtgccggcgcggctgggccaggccgaacaatggctcgcagaacagcgtgcggcttgggaagcgcgttccgaccgcatggtcgatttcgtcgaaacccttcaccgacaggagcaggcccatggccgtagacgcaggtaacaaccccgacaccgatctggtgatctgccgtgtgctgaacgcaccgcgcgccgccttgtggcgggcgtggaccgacccggaactgctgcgccagtggtggtgcccgaagccgtggaccaccgaggtacgcgcattcgacctgcgccccggcggggccttccacaccttcatgcagggccccgatggcggcagcagtgacaatccgggcagtttcctggagatcgtgccgcagcagcgcctggtgttcacctcgatgctgggtgcgggctggcgaccgcagtcaccctggctgggctttaccgccgtgatcacgatggaggacgaggggcagggctgccgctacaccgcgcgggtgatgcacccggacaaggccctgcgtgaccagcatgagcagctgggcttcttcgacggctggaacaccgccatcgaccagctggaagccttcgccgccgggctgtaggccggaatgcggggtggaggggtcagggccctttctgcgaaaggggtccgacccccgcgatgttggggtcggatccctttcgctgtgaaagggctctgaccccggttcaccggatcaaccgacgcgggtaccgaagatgcggtcgccggcgtcgcccaggcccggcaggatgtagcccttgtcgttgagctgggcatcgatggctgcggtgtagatctccacgtccgggtgcacggccttgaccgcttcgatgccttccggcgcggccaccaggaagatgcccttgatgcggcgggcaccggcacgcttgagcatgtcgatggtggcgatcagggtgccgccggtggccagcatcgggtccaggatcagcgcgtcgcgctcttccaggcggccggtcaggcgctcgaagtagggcaccggctgcagggtttcctcgtcgcgctgcaggccgaccacgctgacacgggccgccgggatcagcgacagcacgccgctgagcatgcccaggccggcacgcaggatcggcaccacggtgatcttggcgccggcaatacgctgcaccgtcaccgggccggcccagccgggcagggtgtgcggctcggtgtccaggtcggcggtggcctcgtaggccagcagcgtacccagctcgttggccagttcgcggaaatccttggtgctgagcgcagcgttgcgcatcaggccgatcttgtgctgcaccagcgggtggcgcacttcgacgatcttcatggtcgggaagggggaaaaggagagaggaggccattttgccggattggcgtgtcgaaccccaaaccgggcctggatctgatctacatgaaatgtgcaggcgcatgtcacggccatgcaaccttgcggacataccgtgcagacccattcttaacaggaatggggattcccagtgcatatcaagactccgttggccgttgccatcaccctgaccctggcgatgggggccgcggcaccgctgcaggctgccgggcaacaggcggtagccgctaccggcgccgtggcggccgacgcggtagacctggaccgtatcgaagtgcgcgcccagctcgaatcgcagatccgcgcggtcgacctcaagcgcagcagcgacgccatcgaggacgcggtgtcctccgatgccctgggccagtatccggacaagaacgtggccgaatcactgcagcgcctgccgggcgtcagcgtgacccgcgaccagggcgaaggccgcttcgtggtcattcgcggcctggatgccaatctcaacagcgtcagcgtggatggcatcgccatcggtacgccggaagattccagccgcgccgcgccgctggacgtgatcccatcggactccaccgagcgcctgcgggtggtcaagtcgccgaccccggacatgcccggtgatgccatcggcggcgccgtgctggtggaatcggcgtcggccttcgaccgcgacggccgcagcctgcgcggcaagatcgagggcagccaccagcagctgtccggcgagaccagccccaaggccgccttcaactacagcgaagtgttcaacgacacgttcggcgtggcgctgggcgtgaattaccagaagcgccggttcgagtcggacaacaccgaagtggagtacgacggcgaggacgatgccgcccccggtgacgtgaccgcgatcaacctgcagcaccgcaagtacgagatcgagcgcaagcgcatcggtgccaacctcaacctcgactggcgccccaacgaagacagcacgtactacctgcgcacgctgtacagccagttcgacgatgcggagacccgccagcgcgtgatcttcaacttcgacgacgcgaagatggtcaagaccggcaccgaccagtaccggctcgatggcatgccgaaggactcgatcgacaagcgcatgcgctaccgcaccaagaaggagaacacctttgcggccagtcttggtggcgagaacaagctgaccaacgccgtggtcgattaccggatcggctacacccgtaccgaagagcgcgtgaacgacgagatggaggcgcgcttcaagctcaacggcaaggccttcaatggcaccctggaccagagcagccgcctgcccagctacagcttcgacaatccgcagtggctggacaacggcaactacgcgttcgaccgcgtcgtgctttcgcccaagcaggtgaacgacaaggaacacagcgcgcaggtcaacgtgcgcttcgacggcgacagcagcagcatcaagttcggcctgctcggccgctggcgcgaccgcgacgtgaatgtcgatgagcgcgaactgcgcgtcggcccgaaggtggtgctgtcgagctggaccacctcttcgccggagcatcgccacggcaacatgggggatggcatggactcggctgcgatgcgcgcgttctgggccgccaatggtggccagtacagcgcccgcccgcaggatgtcggcggcaatgcgatgacgtcgctggaagaggattacgtggccagcgaggacatcttcgccagctatgccatgggtacctgggatgtgggcgcgctgcgcatcatcggcggcgtgcgcgtggagaacacccgcttcaaggcagtcggcaaccaggtggacgtggccgccaacggccgcagcttcaccgtcaccccgcgcgtggccaacagcagctacaccaacgtgctgccgggcctgcatctgcgctatgacgcggccgatgactgggtgctgcgcgcctcggccaacaataccgtatcgcgcccgtccttcggcgacgtctcgccgcgcgtgggttacagccgcggtgacgaggaagtgcgcctgggcaacccggaactggatccgtacgaatcgaagaacatcgacctgtcggtggagaagtacatcggcagcagcggcatcgtttcgctgggcctgttccacaagtcgatcgatggctacatcgtggagaccgtgcggaccaatgatccggcctacggcggattcgacgtgacccagccgatcaatggtcgcaaggccaccgtgcgtggcgcggaattcaactggcagcagcagctggccttcctgccggagggcctggatggcctgctgatcggtgccagtggcacctggctggacaccacgttcgatgccggcatcaagggacgtgagggcgaggacttcaccctgccgcgcgcttccaagcatgtctacagcgcacacatcggctatgaaaagtacggtgtaagcacgcgtctggcggccgtgtaccgcagcgagtatctggacagcatcggcaaggggcgtgcattcgacatctacgtggcacccaacacccagctcgatttctcgctggactacaagttcaccccgcgcgtgagcatgtacttcgaagcgcagaacctgctggacaagccgctggagctgtaccagggcacccgctcgcgcaccctgcagatggaagagtacggccgcacctatgcgctgggcctgaaggtggcgctgtgatggggcgtggcgtcactgtcctggccgccgcgctggcggctacgctggtcgccggctgcacgccggccaccggcaacgatccggttgcgggagcggccgcgccggccgccaatggcgagcgcgtggtgagcaccatcgccgaagcgttcctgtcaccgatgaccccggccgacaacatcgactcgccggcggcctggcgcgcgccggacggcgcgctgtggctgatcgccaccgccaaggccaccgacaagctggtggtctacgacggcagcaccggccagcacctgcgtgacgtcggcagcagcggcaccgcaccggggcagttcgaccgcccaaacggcatcgcggtgaccgacgacctgctgtggatcgtcgagcgcgacaatcaccgcgtgcaggtgctgagcctgccggacttcgcgccgctggcgaccttcgctgcggacgacctgcgcaagccgtacggtctgtgggtcgaccgccgtgccgatggctacagcgtctacgtcaccgattcctgggacaacggcgaggatgcgcaggggcgtgacatcctgccgccgctggccgagctggacgagcgcgtgcgccagtaccatgtgacccgcgacggcgcgaaggtcgaggcgaagctggtggccagcatcggcgataccaccgaggccggtgcactgcgcgtggtcgagtcgatctggggcgaccccgagaacgaccggctgctgattgccgaagaggacgagcgctacgccagcgagttcaaggtctacaccctggcgggccgcttcactggcaccacctttggacgcgacgtgttcaaggcccaggccgaaggcgtgaccctgcgcacctgcggcaaggacggctggtggatcaccaccgaacagggcaagcagcgcagcgtgttccacctgttcgaccggcacacgctgaagccggtcggcgcgttccagggcaataccgtggccaacaccgatggcatctggatgatgcagcagcccagcgcgcgcttcccacacggtgcgctgtatgcagtacatgacgaccagggcgtggtggccttcgactgggagagcatcgccaagcagctggcgttgccgctggagtgtggcgcatgagcgggcagtgcgtaatgcgcgcgctggcgctgggcctgctgctggcgctgccgtcgctgtcgttcgcggcggccgaaccgaatacccaggtgccggcaggtagccgccactacgcggcgacgacggtgccggaccgcatcgtcgcctcgccggcggttgattccagccatgggttcgccgtggcctggcgtaccgacgacagcgtgcaggcgccgctgctggaaatcgcgctggccgcagattcgccggccattgaaggcatccgccaggtgcgtgcgacgacccgcgcgctgcagaccgagaacggtctgtcgcaccaccatcgggcagatatcgatggcctgcagccggatacccagtacgtctaccgtgtgcagggcaatggcagctggagcgcctggaaccagctgcgcacgctggccagcgccgatcagccgctgaccctgctgtacttcggcgatacccagaacaagaacgtcagccatgtcagccgcgtggtgcgtgccgcgcagaaggctgcgccgcaggcgcgcatgagtctgtttgccggtgacctggtcagcggaggcgacaacatggatgacagcgagtggggtgagtggttcgctgcgaccagttggctggcgcaggaaacgctggtggcgccggccatcggcaaccacgagtacttcgaggaattcgaggacaccccgcaggagcgccgcgtgctgggccgccactggccggtgacgttcgcgctgccgggcaatggtgccaccgccgcgcagcagaccagctactggttcgatgcgcagggcgtgcgcgtggccgtggtcgatggcacatcggcactcgacctcggcaccgccaaggcgcaggcacagtggctggacaaggtgctgaccggcaatcggcaggcgtggaccatcgtgctgctgcaccagccgttctactcgccgcgcgaagggcgcgagaacgccgcgttgcgtgacgtgctgctgccggtggtacgccgccacaacgtcgatctggtgctgcagggccatgaccacacctatggccgccgtggcgaagggcaggccgcgacgccgcagtatgtggtgaccgtggccggaccgaagcagtaccgcctttccgacgaagcgcgcaggacgatggacccggtggccgaggacacccagctgttccaggtgctgaacatcgacccgcagcacctgcgctatgaagcacgcaccgtgaccggccgtctttacgatgccttcgaattgcgtcgtgatgccaagggtggaaagcagcgcacggagctgaccgaaggccgcattgctccgcgcgactgcccgcgcgcgcagaccgccaagggtcgcgccgaccgctgctgggaatgaggagacgccgatgaccacaccccgccgcatcattccattggctgccatcggcgcgtccctgctgttgctggccagtgcggtaaccgccgccgataccgtgctgcatcccttcctggtcgcccagccggcgcaggccccgcaggaggtgaacctggcggtggagatcccggccggcagcttcaccaagtacgagatcaaggaagacggcctggtgcacgtggaccgcttccagtcgatgccggtcgcctatccggccaactacggctcgatgccgcgcaccctggccggcgacaacgatccgctggatgcactggtgttgacccgcgaaccgctgcatccgggcgtgatcgtgcgtttccggccgatcggttacctgaagatgatcgatggcggcgagcacgacgagaagatcatcggggtgccgaccgacaaggtcgacccgacctacgccagtatccgggacctggcggacctgccggaggccgaacggcagcggatcgaagcgttcttccgcgtctacaaggacctgccggccgggcgcaacccggtgcagctaaatggctggggcaacgccgccgaggcacggtcagtgatccgcgaggccatgcagcggttcaagcgctagaaccccgccgtgggtgggtggccggacgcgcgcatcaccttcaccgcccctggctatcatgtccgccttccacaacgaaggcggtgcatgtgtcggtagcgttggtatggttccgccgtgatctgcggctgcaggacaatccggccctgcaggccgcgctggatgcgggtcacgacgtggtgccggtctatctccacgcgccgcacgaggacggcgagtggttgcctggcgcggcctccgatgcgtggcgccaccgttcactgggtgccttggacgccgacctgcgcacgcgcggttcgtcgctggtgctgcgtagtggtgacagcctgccggccctgcagttgctgatcgggcagaccggcgccgaggcggtgtactggaaccgcaagtacgagccggccacccaggcacgcgacgccaccatcaaacgcacgctgcgcgagcagggcatcgacgcacagagctgcaatggcagcctgttgttcgagccctgggacatcgcgacacagcagggtcagccgtacaaggtgttcactccgtactggcgcaacgtactcagtcattggcgcctgccgacgctgagtgccgcgccgaaggcactgaccgcgcactcggtcgacggcctcgcattggacgagctgcggctggcgcccacgctggactgggattccggcttctgggagcactggcagccgggcgaggccggcgcgctggaggcgttgtccgtgttcgaggacggcgcgttgcgcggttaccgcgagcagcgtgacctgccggaccgggtcggcacctcgcggctgtcgccgcatctgcatttcggcgagatcgcaccgtggcgcatcgcgcatgcgctggagagattgcgcagtgccggcactgacgccgacatcgacggctatctgcggcaactgggctggcgcgatttcgcctaccacctgttgcatcacttcccgaagacgccgaccgacaacctcaatccgcgtttcgaccgcttcccttgggccacgcccactgcagcgcaactgcatgactggcagcgcggcaacaccggcgtgccgatcgtcgatgcgggcctgcgcgagctgtggcacaccggttacatgcacaaccgggtacggatgattgttgccagctacctgtgcaagcacctgcgtgcgcactggctgcagggcgcgcgctggttctgggacaccctggtcgatgccgacctggccaacaacacgatgggctggcagtgggtggcaggcaccggcgccgacgcggccccgtacttccgggtgttcaacccggtcacccaggccgagaagttcgacccgcaggcgcgctacatcagccgctgggtgcccgaactggcggcgctgccggtgaaggcgcgcttcgcgccgtggcagcatccgctgctgctggcggcgcatgccccgggctatccgcgtacgccgctggtggatctggccgccggccgcgatgctgcgctggccgcctaccggcagacgggggctgggtaaagcgcgggctgagcgttccagtcagttagctgaacgcggccctgttgccgcgaccgatcatcatcccgacatcgcatcgggctgtttattctctctgcgcccgtaagccgccgacccgaccggaaaacaaggagaaccacatgatccgcaacaccacccgcaacgtcgcactggccctgatgagtgcggccgtcctgtcggcctgcgccaccggcggctcctatgtgcagagcgaccagtacggcaacccgaccgaacagcagaaccgtaccggccgcaacgcgctgatcggtaccgccatcggtgtggctgccggccttctgaccggtgacagcgccaccgagcgtcgtcagcacgcactgatcggtgccggtatcggtgcgctcagcggcgccgccgtcggccagtaccaggatcgccaggaacgcgcgctgcgcgagcgcaccgccaacaccggcatcgatgtgcagcgccagggcgacaacatcatgctgaacctgccggacggcatcaccttcgacttcggcaaggccaccctgaagccgcagttctacggctcgctcaacggtgtggccggtacgctgcgcgagtacaaccagaccatgatcgaagtggtgggccacaccgacagcatcggcagcgacgcggtcaacaaccgcctgtcgaaggaacgcgccgattcggtggcgcagtacctgatcggccaaggcgtgcagagcgtgcgcatcgaaacgctgggggctggcaagtcgtatccgattgccgacaacagcaccgatgccggccgtgccaaaaaccgtcgcgttgaaatccgcgtgattccgctcaagcaataacgcgtagcgttgttgcttgagccggtccggccatcggccggaacgaaaatgccgcccttgcaggcggcatttttgtgggtgccgagcttgctcggcacgccgacagcgttcccgttcgcggcttctccgaacggcgccgaccaaggtcggcatctaccgaaagccacgcagccggaacgaaaatgccgcccttgcaggcggcatttttgtgggtgccgagcttgctcggcacgccgacagcgttcccgttcgcggcttctccgaacggcgccgaccaaggtcggcatctaccgaaagccacgcagccggaacgaaaatgccgcccttgcaggcggcattttctgtaggtgccgagcttgctcggcacgccgatagcgcttccggttgcggcttctccgaacggcgccgaccaaggtcggcatctaccgaaagccatcggccggaacgaaaatgccgcccttgcaggcggcatttttgtgggtgccgagcttgctcggcacgccgacagcgttcccgttcgcggcttctccgaacggcgccgaccttggtcggcgccgttccaaccgcagtcgagcatggctcgactctacagaagccggttacaccgtcgaggcggcgaccttctccaggatgcgcttgccgctgctctccaacgccgcgtcttcctgggccttctgctgctgtgccagcttcgcacccgggcactgcgccagcatgtagttggcgtcgaagttgagcttttccaccaggaaatcgacgaacgcccgcaccttcggcgagaccaggcggccaccggcgaacacggcgttgaagtccacttccgggccggtccagccggccagcacgcgccgtaccatgccggactcgacgaacggcttggccatcacatcaccggtcagcagcaggccttcgccacacaccagtgcaccattaagcgcagacatgtcgttggcggtcatcagcggggtgaccgggaagtcacgcagctcgccgccgttctcgcccagctgccaggtgaagcgcggtgaattgccagtgtgatacggcttgcgcatcgccaggatgcgatggaactgcagttcttccggatgcagcggctcaccatagcgctcgatgtaggccgggctggcgaacacctgcgtgcgcaggctgcccagcttgcgcgcgaccaggttggaatcgggcagggcgcccacacgcagcgccagatccgcttcgccggcaatcaggtccagcttctcgttgcccatgtgcatgtccaggcggatttccggatactgcgcatggaactggcccagcagcggggcgatccaggtgatgccgatcgaatagggcacggtgaagcgcagccagccgcgcgggccggactgcaactggctcaccgcgctttcggcttcttccagctcgcgcgcgatgcgctggcaatgctcgtggtagatcgagccggcttcggtcaggccgaggcggcgggtggtccggtgcagcagccgcgcgcccaggcgcgtttccagctcctgcactttgcggctgaccgtggtcttgggcaggccgagcgatttggcagcggcaatgaaactgccttgctcgaccaccttgacgaagatcagcgtctcgttgagatcgtgggacatggtcggggatcctggacgtcggggatgggacaatcgtgacagaacgattggaccgggagcgggatgattattccccttaatcaggactaatcaagtaaaggtttgaggtctatcgtggcgccattcgtgaaatggagccccctcgccatgagcctgcgcaacattcttgcccgcttccggcatgtcggccagaacaccctggacctggcgatgaccgtcgaagcccgtccgagttccttggtacacaaggactttcgtgagtttaccgcgcccatgcgtcagcagcgtggcggtgccatccgcctggccccgcacaagggtgaccggctgcgccggatcgggactatcccggatttgggaggaaatgtcccgtgaatgggatactgacgcccgaagtcctggtcctcggcggcaccggtgccgtcggccagggcgtggtcggcgcattgctggaagccggcagcccggtgctggtggttggccgcgacccgggtcggctggcggcgctgcatgagcagttcgccgatgagcctggcttggagacgctgctgggctcgctcagcgatgacggctcggcacgtgccttggccgaacgcatcgcgcagcgcccgcgtccgctggcggcggtcatcgccgcaatgggtgggccctaccgtcgcggccgggtgaccgaccgcaatggcgatgagctgttgggggcgatgcaggccgacctgatgccgcacgtgcacgcggtgcgtcacctgctgccactgctgcaggacaacgtgcatgcacgccgctacgtgatgatcggcagccccgccaacgccaagccctgggcgggctacggcgagacctcgatcaccaccgccgcgctgcgcatgtacgcgcaggtggtgcaccaggaagcgcaggcactgggtgtgcgcgcgcagatgctggaagtctgcagtccggtgtgcaccccggccaacgcggccaatgcgtgcatcgagtggccaagctcgttgctggtcggtcgtcgtgtggtctccctgctggacggctgccgcgacaaccgcgccatcgtccgctgcgacagcagcgatgccgaactgccgcgcggcctgctgcacctggatgtccctccactgtggcgcgataccgcgggcatcgcttgacctcgaccatggttgaggtcgcagtatgcgccgccgatttttgcaacacgttctcatatagctgtaccacccctccgtacggatgcatgccatgacttcccccaataccaccccacatcgtttcggccatcgcatcgcgatggtcggcgtgtcgatcctcgccgcggccgtgcttgcggcctgcagcggcggccatgccgaagaggccggtgctccgccgccgccgcaggtcagcgccgcgccggtgctggtcaagcaggtcagccagtgggacgagttcagcggccgcgtcgaagcggtgcagagcgttgaactgcgcccgcgcgtgtccggctacatcgacaaggtcaactacgtcgaaggccaggaagtgaagaagggcgaagtgctcttcaccatcgacgcgcgcagctaccaggccgagtacgatcgcgcggccgccgagctggcccgcgcccgcacccaggccacgctggcccgcagcgagtccgagcgtgccaagcggctgtccgagcagcaggcgatctccaccgagaccgccgagcagcgccgcgcggctgccgaccagtccggcgccgccgtgcaggccgcgcaggcggcgctggacgcagcccgcctcaacctggagttcaccaaggtgcgtgcaccgatcgatggccgtgccggccgcgcgatggtcaccgccggcaacctggtcaccgccggcgacagcgccagcgtgctgaccacgctggtctcgctggataccgtgttcgtctacttcgatgccgacgaaagcaccttcctgcgctatgcacagatggcacgcaagggcgagcgccccagcgagcgtgacagcgcgctgccggtgaaggtcggcctgtccggcgaagagggctacccgcatgcgggcaaggtcgacttcctcgacaaccaggtggcccgcagcaccggcaccatccgcgtccgtgcgctgctggacaacgccgaccgccagttcacgccgggcctgttcgcccgcgtgcagctgcttggcagcggccagttccaggccatgctgatcgatgacaaggccgtgctgaccgaccaggaccgcaagtacgtctacgtggtagacaaggatggcaaggcccagcgccgcgacatccagctcggccgcaccgccgacggcctgcgcattgtcgagcacggccttgccgccggcgacaaggtgatcatcgacggcgtgcagaaggtcttcatgccgggcatgccggtgcaggccaaggccgtggcgatgcagccgcaggctgcgccggcaccgggccgcgatgccaccgccgccctgaaccactgatccgccggctcctgatccgcgtccccgcttagctgccggcgccagcggcagccttccctgccttcgtcatcccggcgaggggcagggtggctgttgcccgccggacgcctttcccaggaattcctccatggacttttcccgtttcttcatcgacaggccgatcttcgcggcggtgctgtcgatcgtgatcttcgccgcaggcctgatcacgattccaatcctgccgatcagcgagtaccccgaagtggtgccgccgtcggtggtcgtgcgcacggtgtatccgggcgccaaccccaaggtcattgccgagaccgtcgccacgccgcttgaagaagcgatcaacggcgtcgaaggcatgatgtacctgaagtcggttgccggctcggacggcgtgctgcagatgaccgtcaccttccgccccggtaccgatccggacgcggcggcggtgaaggtgcagaaccgcgtggcgcaggcgcaggcgcgcctgcccgaggacgtgcgccggcagggcgtgactacgcagaagcagtcgccaaccttcctgatggtggtgcacctgacctcgccgcaaggcaagtacgacaccctgtacctgcgcaactacgcccgcctgcacgtcaaggatgcgctggcgcgtattccgggcgtgggtgacgcgcagatcttcggtggcggcgactacgccatgcgtgcctggctggacccggacaaggtggcttcgcgtggcctgaccgccagcgacgtggtgcgtgccatgcgcgagcagaacgtgcaggtttcggcgggccagctcggcgccgaaccgttgccgaacagccagttcctgaccctgatcaacgcccagggccgcctgaagagcgaaaaggaattcggcgacatcgtgctcaagagcggcaccgatggcgagatcgtgcgcctggccgacgtggcccgccttgaactgggtgccggtgactacaccctgcgctcgcagctggatggcaagaacgcggtcggtatcggtatcttccagtcgcccggtgcgaatgcgctggagattcgtgaccaggtcatctcgacgatggacgagatgcagaagaccatgccggccgacgtgaagtacgaagcggtgtatgacaccaccatcttcgtgcgcgactcgatcaaggccgtggtctccacgctgctggaagccatcgccctggtggtgctggtggtgatcctgttcctgcagacctggcgtgcctcgatcatcccgttgatcgcggtgccggtgtcggtggtgggtaccttcgccgcgctgtacctgctgggcttctcgatcaacacgctgagcctgttcggcctggtgctggcgatcggcatcgtggtcgacgacgcgatcgtggtggtggagaacgtcgagcgcaacatcgaggaaggcctgtcacccaccgcggcggcccaccaggccatgcgtgaagtgtccggcccgatcgtggcgatcgcgctggtgctgtgtgccgtgtttgtgccgatggccttcctgtccggcgtcaccggccagttctacaagcagttcgcagtcaccatcgccatctccacggtgatctcggcgatcaactcgctgaccctgtcgccggccctggccgcgcgtctgctgaaagcccatggtgctccgaaggatgcgccgagccgcctgatcgaccgcctgttcggctgggtgttccgtccgttcaaccgcttcttcaagtccagctcggagaagtacgagcgtggcgtggcccgcatcctcggccgtcgtggcgcggtgttcgtggtctacgcgatcctgctggtcggtaccggcgtgatcttcaagctggtgccgccgggcttcatcccgacccaggacaagctgtacctgatcgccggtgtaaagctgccggaaggttcgtcgatcgcgcgcaccgatgaaatgctgcgcaaggtcgccaagatcgcccaggaaaccgatggcgtggcccacaccatctcgttcccgggtctgaacgcgctgcagttcaccaacacgccgaacaccggtgtggcgttcatcccgctcaagccgttcgccgagcgccatggccgcaccgccgcacagatcaatgccgagatcaaccagaagatcgccggcctgcaggaaggcttcgcgttcgcgatgatgccgccgccgatcctcggcctgggcaacggcaacggctaccagatgttcatcgaggaccgtggcaacctgggttacggcgcgctgcagaatgcggtgcaggcaatgcagggcaccgttgcgcagacgccgggcatggccttcccgatcagcagctaccaggccaacgtgccgcagctggatgccgaagtggaccgcgtcaaggccaaggcgcagggagtgcagctcaccgagctgttcgacaccctgcagacctacctcggttcggcctacgtcaacgacttcaaccagttcggccgtacctggcaggtgatcgcccaggccgacggtccgttccgcgagacggtcgaggacatcggcaagctgcgtacccgcaacgaccgcggcgaaatggtgccgatcggttcgatggtcaccatcaagcagaccttcggcccggacccggtgctgcgcttcaatggctatccggcagcagacctggccggtgaggctgacccgcgcctgctgtcctcggccgaggcgatgaacaagctgaccgagatcgccggcaaggtgctgccggtgggcatgaccaccgaatggaccgacctgagctaccagcaggcgacccagggcaaggcggccttcatcgtgttcccggtggcgatcatgctggccttcctggtgttggccgcgctgtacgagagctggtcgctgccgctggcggtgatcctgatcgtgccgatgaccctgctgtccgcgctgttcggggtgtggctgaccggtggcgacaacaacgtgttcgtgcaggtcggcctggtggtgctgatgggcctggcgtgcaagaacgcgatcctgatcgtcgaattcgccagagagctggagatgggcggcaagggcatcgttgaagccgcgctggaagcctgccgcctgcgtctgcgcccgatcgtgatgacctccatcgccttcatcgccggtaccgtgccgctggtgctgtcgcacggcgcgggtgccgaggtgcgctcggtgaccggtatcaccgtgttcgccggcatgctgggcgtgaccctgttcggcctgttcctcaccccggtgttctacgtggccctgcgcaagttcgtcacccgcaacggcggtggccagctggtgcagcacggcgagccgaccatccaccactgacatggaaccccgtcgccgccggtcactggccggcggcggctttccacccacaaggcatgcatccatgaatacccatcagaacaagatcgcgctggtcaccggcgccacccgtggcatcggcctggaaaccgtgcgccagctggcccaggcaggtgtgcatacgctgctggccggtcgcaagcgcgatacggcggtggagctggcactgaagctgcaggctgaaggcctgccggtcgaagccctgcaactggacgtgaccgacgcggccagcatcgccgaagcggtcgagcaggtgcgccagcgtcacggccgcctcgacatcctggtcaacaatgccggcatcatgatcgagaacccggcgcaggcgccgtcggagcagtcgctcgacacctggaagcgtaccttcgacaccaacgtgtatgcgctggtcgcagtaacccaggcattcctgccgctggtcaagcaggccaagtccgggcgcatcgtcaacgtgtcgagcatgctcggctcgcagaccctgcacgcggatccctcatcgggcatctacgacttcaagattcccgcctacaacgcgtccaaggccgcggtgaacagttggaccctgagcctggcctacgagctgcgcaacaccccgatcaaggtcaataccgtgcatccgggttacgtgaagaccgacatgaacggcggcaacggcgaaatcgaaatcgccgaaggcgcgcgctccagcgtgcagatggcgctgatcggcgaatccggtgccagcggcagcttcacctacctgggcgaggtgctgccatggtgatccgcacgttggcgatggccgtctccagcctggtgctggcaggctgtgtcagcgtcggcccgaactacaaggccccggtgcaggaaccggtggtcctgcagagcgcacagcagccggtcttcagcaccgtttcgccggtggccagctggtgggcgcagttcgatgatccggtgctggaacagctggtgcatggcgccctgtcggacaacctggacctgcgcgtggccgtggcccgcgtcagccaggcccgcgcggtgttcgtcgaaagccgtttcgaccaggcgccgcacatcaccgctggcggcagctacgaccgccgcaagcaacccgatccgcagctgggtgggcagcgggtgttcagtgaaagctaccagctcggcttcgacgccggctgggagctggatctgttcggccgcaagcgccgtgccgctgaggccgcacgcgccgacctcggtgccgagcaggccaacctggccgatgcgcaggtactggtcgccgccgaagtggcacgcaattacttcgagctgcgcggaacgcagaagcgcatcgcggtggcccagcacacgctggaaaacctgcgcgatacgcagaagctgaccgaggcgcgctgggaactgggcgcgggaagcgagctggatgtgcagagcagccgcgcccgcctgaaggcgatcgaggccgacatcccgttgctggaagtggccgaggcgcagtcgcgcaaccggctggccgtgctgctcggccagcgcccggaagtgctgaccgacatgctcgcgccgcacgacgtgccggccttcgccaaggcgctgccgctgggcgatacccgcgaactgctgcgccagcgcgccgacgtgcgcgtggccgagcgtcgcctggccgctgcgaccgcacgcgtgggcgtggccaccgcggacctgttcccgcggttgtcgctgtccggcttcgtcgggttcctcggcggcgatgccagtggcctggtcaatggcaacaacaaggcctggtcgctgaccccgtcgctgagctgggcagcattcgacttcggtaccgtgcgtgcacgcctgcgtgccagcaaggctgaagccgaaggcgtggccgcgcagtacgagcaggccgtgctgctggcgctggaagataccgagaacgcgctgacccgctattccaagcagcaggcacggctggcgatcgtggtcgagcaggcacaggccgcacggcgtgccgaatcactggcacagatccgctatcgcgaaggctcggaagacttcctgaccctgctggatgcgcagcgcacgcagttggcggccgatgacgccctggcggcggccgagtccgaagtcaatgtcagcgtggtgggcgtgtacaaggcgctgggcggctgggggcaatcaccgcagcaaccgagcgtggcgcaggtgcagtaaccgcaggggacggaggcagtggcttccgtcccctcctgctttcagggccactgattggccggcacctcgcgctcgcgcatgcgcacgatgcagaagcgatggccggtcggtgcttccatcacccaccagcgtttgacgaagcctatccggcgcgcgccgagcttctccaggcgatcggcctcggcatcgatgtcgtcgctctcgatgtccaggtgcacccgtgacgggtgatcgacccgctggacttccacgttcaagcccgccggtgcacccagcaggtcggcatactcggcgcccccttcgacacgcgccgcctgtgcctgcaggccgagcgcggcggcccagaaaccggcacctgcgtcggcgggaaggtcctggcagtcgatgatgaatcccgccagccggctctggtgggccatgtcctgctccgcagttcgggggaggaggcagggtaacgcgatgcgttccgcgtacatcttcaccttcgtgacgtttctgactctgccggaatgccggcccgacgtgtaacaagtgggtcaggcactcgggaggacaggcgatggcggatggaaggcgggatacccaacggatgttgttcggcgatccgggtccacccggtgcgggtctgtcagtggcggtcgtggtgctgctggtgctggcgacgatggcggcggcggtcggtttcctgcgcctgcaggattcgatgttggggctgggcctgattggcgtggccgtgttcctggcgatcggggcccgcatctgccaggcgcgcgaccagcatcaggcgctgtatcgcctgctgtcgcggcagccaccgccgtagcggcggctgccgtggctgctcagtgcctgggccagtccagttcgaccaccagcgggaaatgatccgatggcagcacgccaccgatgcggcggtcatcggtcaggaagctgcgcgcatggaagccgcgcaccaggacccagtccagctgcacggtggccttgccggtgaaatcgtggaaggtcagccgcgggccctgcggagccttcacctgggtacgggtgtcctgcagcacgcgggtgaatgccttgtaggtgtcgccgccgggttcgctgttgaagtcgccggtcagcacgacgggcagatcggccggcaggttggccacgcgcttgccgatcagttcggcacccttgacccgccgcggctcgtcttcgtcgcggtagggcaggtgggtgttcatgaagtagaagcggcggccgtcgtcgatgcggcggaacagcgcccaggtgaccatgcgtggatacaggttgccccaagtgatgctgccgggcacatcgggcgtatcggacaaccagaagttgcctgattcctcgatcgccagcaccttgctgtcgtagaacacgcccatgtgctcgtcgccgctgccgccgcggcggccctcgccgaaccaacggtagccggggaggtgtcctgccaggtactcggcctgctcctgcaccagttcctgggtgccgatcaccgccgggtgcgcatcgaggatgaccttcaccatcgcgtcgcgacggtcgggccagcgcttgcccggctcggtatcggccggggtgcgcacattgaacgacatcaccttcaacggcgcgggggctgcggcccaggcgctggtcgcaggcagggcaagcgccagcagcgcagacagtacagggcgacggaaacgcgacaacatcgtggaatccctccattccatgaaaacggtttcatggagcatcgcacggattgcctgttcatggctgtgcgcgcgctggcggtatccgccggtcgccgcggcgtattcagcagggcctttgacagcgcattgacccgcccgcgcgggcctgcgtgctagaacggcgctgccggccactgaacccggcaccgcagcaaccatcaacggaaccacaaggagctgtgccatgacacgattgattcgcgccctgcaggtgtcgctgaacctgcgttcggacaattccacgcagtgcatccgttccaagtatcgctactggaatatcttctgaccggaaggactccacgtattcgatgacatcgccagggagggtcgatgatcttccctggcattggaggcagggcatggatgagcgtgcagcggatgcggaagtggtttccatcgacgacctgctcgaacgcgtgcgtcgcgaagggccggtactgcgcttcaacaatgatgtcgtcggcatctttgatccggccctggcggtcaggatcgacaaggccaacaccgaccagcacaccgtaccggattcactgattgattttctcgggctgcgcagtggcagggaccctgttgcgtggcgcgaggtgcgggcgttgctgagcgagcaggccgggcggctggccagtcccggccacatgcgcgacctctacacgcgcatgcacggcttccttgcccagcgcgcggacaggccgcatgacctcagcgaactgagctggtggacgatctcgcagtcgctgttgccgatgctgatcgacggcctcagtcgatccgacgtcgatgcgctcatcggtgagcagaagacccgatacaacgccatcgtgctgcagaacttctcattctggcggcggatcatcgacttccatctttcccgccgcgcggcgcgcacggtgtcgcggcacatccggcgtcgtgcgcgccagaccgtgccgcgcgaggacttcctgcaatccctgctgccgctggtgcagcgggtcggggtggatcgcgtggcctatctggtgtcgatggtgctggccggcatgtcgggcctgccgggcatcacggcggccagcctgctgtacgcgatgtaccgatttccgcactggcaggcgcgtatccgcgaggaaacctcggcgctgagcctggagcagttgtatgcgctgccgatcaagtcgctgccgtgcacgtcgcgtttcgtcaaggaaaccctgcggctgtggccgggactgttcgccctgcatcgtccggcctcgcacgatatcgatatcgagggcgtgtgcatccgcaagggcggggcatacgagttgtcgtcctacttccagcatcattcgccggagtactggcagaacccggacagcttcgatcctgatcgctggttgccggagcgacgccaggccaacaagggcgcctacgtgcccttcggattttcctcgcgggcctgcatcggcagtgcggtcggccacgcgcagctgctgctgttctgcgcattggtgacccgcgatttcgagttgacggtgcaggatgagcccacgccgtggatgcagctggaaggctttgccattccggtcgatttcatcggtacgctgacgccgcggcacgcctgacagcatctgtactgcctggctcagtcttcaatctcgccacggcggcctgccgcgcgcaccgcctgcgcggtggtggccacgccgagccgttgtcgcgctcgccgcaggtggttctccaccgtgcgtgcagacagccccagcgtggccgcgatctccgcctggcgccgtccagcggcgacccagcgcagcacctcgcgttcgcgtgcgctcaacgcgcctgcgcgaacatccgcgggcgcctcggcgagctggcgcgccgcacggaaggctgacgttccgaccatttccagcagcaggcgcgcgctggcggatgcatcaatcgaggtgccggcgaaactgaccgcaccctccaggccggtcgggccgaacaccggaacctgtaatccatgcaggccatcgccgcgcggctgcttcaccacctgatagcgttcgccgcgcacgccctggcgcttgctccagaagaacggcgcattgctgtccagtacatggcggttgaccgggcaggcatgcaggtagcgggcaagtccggtatcgctgccgtcgccgaaccagtcaccctcgatccagtacacgcgctgcgcgtcgcgttccagcccggtcccggtggcaaacaccagcagtcgatcgtagcccaggggtgaggcggcggcgcgcagcacgccgcccaccgcgggcagtgaccgcgcctgttccagttccagcagcgcgggcaccagcgcaggcatgtgctcagcgccccgccagtgcatcgagcagcgtacgcgcggccagcttgcccaacgcgttgccggccagcggactgtcgccggtcagcagcaggcgatcctgcagcacgctgccatcaaccccctcgttgacgatctgcacgccctgctgcgccaggcgttcaccgaagaaccaacgcagctgccccggcatgtagccgatctccggtgtctgccggtccattgcgtcggggaaggcgcagatgcggtaaccacggaacagcgagccaccgtcggcttcgtcgacgcccgccgccagcagcgccgccgggccatggcagagcgtgatgatgtggcgctgcccggccatggcccactgcagcgtggccttcaccgccgcgctctccggcaggccgatcagtgcgccgtggccaccgggaatgaagatggcggcatagtccgaatcggctcccaggccggccaccacctcatccagctgcaacggctggcggaagcgcgcctcatagcgttcgtacagggcgccgatctcgcggtcctcgcgcgggaaggcccaccactcgaacttcacggcgttgccggacagcgtcgccacgtcgatgtcgaagccggccttgtccaggtggtacatcggcagcagggtttccaccgggtggttgccggtggagaacaggtggccattggcggtcggcagataacgctcgtcggcggcgatcatcagcaccttccagcggccatcgcggcgtgcatccggatagtcggccccggacaggtcgctcttgggcgaggtgaactgcgaaagcgagtacggcgacgggaagaaggcatcgcgctcggccggatcggggctgggctggcggctgggctcttgcgtgttcatgcggacctccgttgggggaaagtgagcccagcataggaggccgcgtgcgcaggcgcgatgagggattcccctcaatggaccaccacccggatgctgcatcgcgccaccggcccggttggacagcgggattatgtcgtgttatctagccggtgccgggataatcccggcataaccacacagcaagcaaaggaatgaaaatgaaaagattcgcccgagcattgcgcgtcactctgaatatccatccgaacgagaagagcagtgtgtggaatacctggccgctctgggtcgagttctgatcctgcggggcaaccccgcgattgagcggtagcaagacgaagggactcgtctttcgagtcccttcctgccggagacgcactgcatgcaagggatgtcgaatgaaggcagcgccattgctgccgagcgcctggctgcgcgggtggagcgcgaaggaccggtgctgaaactggaaaccggcggtatcggggtgttctgcccagagctggccggcaaggtcgacaaggagaattccgagcacctgttcgtggtcgagtcgctggccgacctgttccgccggcacgaacgcgtgcgctggaccgaagtgcgcagcctgatcgcgacccgcagtgctgagcttaccggagcgcagaccctggaggcgctgcagtcgcgcatgcggcaggcgttggacgcactgtgcgggcgcgagctggatgccacgccagccgtgtggaaggtgatggcgcatccgctggtgccactggtgatcgacgggctcgacgcgcgcggtaccgaggccatcgaacgcgccctgcatctgcgctacaccacccaggtcgagcaggtcatccatcggcgtcatctgctgcgcaacttcctcatcggtcgtggcgaatcgcgggcgatcgccgccgaactcaggcgccgggtccgcagcggacgttcgccgctggactacgcgcagtcattgttgacccttcgcgagcgcatcggcctggacaaggtcacctacctggtcaccgtgcagctgatcgccatttccggggtgcccggcatgatggccgcctgcctgctgctggcgatgcagatgcatccacactggcgccagcgcatcgaggaggaattcgcgccgctctcggatgcggagatccatgcgctgccgatggccaggattccctgcacgatgcgcttcctgaaggaagtgatgcggctgtattccacgcccttcaacaaccgtcgggtggccgcctgcgatctgcaggtggaagggcaggccatcgccgagggcacggtgttcgagctgagctcgttcatccagcatcgctcggcgaaatactgggatgacccgctgcagttcgatcccgatcgctggctgcccgagcggcgcaagcgcaccgccggcatctatgtgccttatggcttccccacgcgctcgtgcgtgggatcggcggtgggcaacgcgcaactggtactgctgtgtgcgctgctggcgcgcgaattccgtttcacccccagcgccgactaccggcccgaggtgcgcatggaaggcttcgcgattcccgcggcgctgcacggcacgttctcgcgccataaggccggtgcctgatctgcaggggcgggcggcttactttgccgtacgcccgtgttcctgcatgtcctcatgcaggatccgccgcagctcgacgatggccggcgtggcttcctgcacgctgtgaccggacacgatcaccttctccgaaacggcgtgtggcaggtgcgagctccagtagggcaccagcccgtcatcggttttttccagtgggccatcggccttggcgcgggcgatgatcgagtggtagtgcaccttcggtgacatcggcaggtcggccacggcgcggacgaacgggtcgtccttgtccaggttctggatgctgttcatctggtagccgtgcttgccatcgttgcgatcgatctggccgtcgttggccagcgtcgccacgtcctccagcacggtcagcggcagccgtaccaggcggccgatccagcggccgaggcgggtaccggccacgtcggtgccgcgatgcggtgtggcgatgaaaaccacccgcgatacttccggttccggcaggaaggtcagtactggcgcgcccttggtgcgcagcagctcgcgctgggcgggcgtcatctgcgcggtggccagcagggtgtcgaccaggtggtcgccggaggaagagaccatcaaccgcgcgatcaccccgcccatgctgtgcccgaccagcaccatgtcatgcgaggcctgcgccttgccgctggggtcgaagtgcttgagcacttcgcccagcgtgtggcgcatcgcatcgtggctcatcgcgatgggcatgttggtcgggtagtagaactgccagacctggaagtcctggcggatctcgtcgtcgcgcatcagttcgttggccacgttcacccaggcctcgggactgctggccaggccatggatcatcaacagcacgcggcggttcgggtcgtagggctgcatcatgtacagatgcggcgcgtcgatgccgcccttgccaccaaacaacgagcgcagcgactgctggctgaagttggagcgcgccagccacagtgcgtagcccgcagtgaagttggccgccaacggcacctgctggccgtgcagggttacttccgagacctggtagggatcgtggatctccagttccggctcgtcgtcgtgcagcacttcccacaggttctttcccgagaagcgcagcagcaccgtcatcgaaggcgagggcatctcgctccagctctgcgcggccggggtgcttgcctgcgcggcgggcgtcgctgccgaaggcggggtggccgtgctgccagccggatcgtccatcaccgccaccagctcggcaccgaagccatcgcggcgatgcacgctgcgcagcgtaccggtgaacgacagcgaggccgccggtaccagctcggtgggggtgcgcgtgtccagcggcgatgcttcgcctgaaggggccagcacgaaggtccagcggcccagctggaaatggctggcctggctgtgcacgcgcccggtggcgtacgcgttgtacagctgcaccgaggcttcctgcacagccaggttgtagtagtcgcgcacctgggtctggcggtcctcgaaaccacgctgattggcggtgcgctcggtgaagaacagataggcataggcctggcgcgcgacctgcatccacgcatcgaggcgcggctggaagtcggcatccagttcggtgatcgcggtcttggcgcggccggatgccgagtactcgcgcttcggtgccggcagggtcatcgcatgctgcagccacaactcggccaggctggagcgcttgtcttcctcgcgcaccacgatgctgctttccatggcctcgatgcagggcaggccgggcttggcacagacgccctcatcgagcccggccacgcgcagggtctcggtggtcgccgcgctgagcttgccggaggtgaggatgtcaccgcgcttgagcgcgatgtactggccgggcgtgaccgaggcgacctgcaccgacggtccgaactggcgcagcgtcgcgcagccccccagggtgagcagcacggtgatgatgagggtcgtgcggccgatgaagcccatgcccgtggtagccatacgatgctcctgcgcggtggcgtcactctagcggccggcctgtcaaagcggaatagaccgaacggttggtttgggcctggccgccctgggcgattcagccattcccgtgtgacactgcggcgaatggaagggacacggtgatcgcgatggcctggctggaaacccgcattcccccgcccgtggtaatgctgctgtgcgccgctgcgggctttgcagcacgctggctgtggccgggtttccaccttcgggtgccggtgccggttctgctcgcaggcgtgacggtgacgctgggtgtcgtgctcaatctgctgcccaagctgtctttccagcgcgccggtaccaccgtcaatcctctgcgaccttcggcgtcgagcgcgctggttaccagcggaatctaccgccgcacgcgcaatccgatgtatctgggccaggcgttggtcctgcttggcgccatggtgtacctgcagaacctgatcgcgctgctggtggtgccgctgttcctggtgtacatcacccggctgcagatcctgccggaggagcgggcactgatggcccgctttcccgaggcgtacgcgcaataccgtcatcgcgtgccgcgctggctgtagcgtcggctacgccatcagcggctgatctggcacttcaccgcagccgaataaccctcgtagtcgtcgcccgcgatcacgtgcagggtgtggcgcttgtcgatgcgcttcacgtacgacggctcttcggtgttggcatgctcgttgacctcggtcaccgaccaggccttggccaggcgcttggaatcgacgccgttcaagtacacgaagaggctcttctcgccttcggccacgtttacatcggcattggtgaccgtgccgccaaacagcgcgaccggcttgtcctccggctcgaaggtgccgcccggtttcttggccaggccggcggcctgcagcgcatcgatggcgtcggccgcactgaagttcgagccggccttgcaggccagcagcgcttccagcgtggcggtgccggggggcgcgatggccggcgccgcagcgtgcgtggctggggctgcggcgagggtggtgaggagcaggacgagcgtggttgtggcggttttcattgcagatccttctggcggcagcaggccggggcaatgcagcgatggagcgaaagctccatcccgattatgccccacgcttcccgcacgacgagcaggcacaaaaaagccggaaccccctcgacgggagatccggcttcttgcggcctcgacaggccatacagatggtggggtgggctctacagaaagtgacgcccaagtgactgatttgcgcagaattttaatgaggattcctccgctgttaccgccaaagttaccgccaacggatgccgactaggcgcgcttggcgatgacctcggcgacccaccggtcaacctcggtagacacccagcgggttgtccgctccgacagcttgaccggctttgggaacgtgcctgcgcgggtacgttcccacacggtgctctcgcctagcccgacgatctggcagacctcggcaatgggcaagaggcgaacgggagtcgcggcgttgatgttttggtcgtgcatggcttctccaaacgacaaagcccgcgcagcggggcgaccgctggcgggctgtggtggtggttgatggtggaggtggcgcgcgcttctcccgcgccgtggcggtacggaggggcaggcttgcaagcaccgtggggtgggggtggctgctggcctcagcgtgccgctaataggcggaggggccgccggggggtgatagcgaggttccgagtagttagataccgtctcgaaaatttgcggcaaacgtttcgacccgacccaggggcggtctagccctacggaccgctctcgtctgcatcggtcccgtccggtcggtccggtagctcccggagtgccgcatcggcaatgttgcgtacaccggtcatgttgttgaaccaccagatgcgccagaggtcccgcgcctgccgttcggtgacgtgttggtcagggtcgaggagtgccccagcgatccgaccgctcccgtagaccttgttcaggaggtcgatggacgggatgcccatgacgccgtactccaggccggtcgagcggttaccgctgaacacgggggcgttgcccagcgtgtcggcccataccatatccgtcacggccggtacgatgttcgaccaactggattgcgcaacggcgttccgggcaaagttctcaggggtgagctgcttgttcctctgctcctcgttgccgatggtgttgatgtacgtccgcgctgcccatcccatgccagcagcggcggcggacagtgtgaccatcgcgtaggtgcgccagtcgtcgtagtggtggacggagttcaggaagtggcgggtgtagctgttgaccatgaagctgcggaactgagtgacgatgcggccggtagttgagtgcatcagctcgatgccgtccgaggcgtcgccttcgagaacctggtgtcgcgtcacgcggaacaggaaggccgccatgcgctcgcgcgtctggaacggcagcttgtccgggtcgatctgctcgatctgccgcttgcctttgaggtagccgaacacgtcggcctgggccttctcgtcgagaccccaggtgcgcaggcgggccacttcggcgtccgacagcttcttggcgttcgccatgtccagcagccggagcagcgtggcgcgaccggcgatgcgttggagcattgtgttgatcggggccatgccggatgcgaccgaggtgacgtgcgtggccatgttcatcgcgttgtcgatcttctcgccgtgcttgacgttgaacgtctgcggcacgagcgcatcctcgtccaggcgcaggaacggcgggttgcgcagccagtcggtgccgggtgcgaacagccgctccatcacgcgcgcctcttgtgaggacagcttgccgtcagcgccgcgctttaggaaggacttcacggcaaacccagaccggacaaagttgcggacgccgccatgagctacagccgggcctagctctgcaaagagcgagaatcccacctggttcattacgcgggcgaagttgtagttgcgtaggaacctggcatatctagctccactgctggtagggtcaagctccgtgctgcggccgaaggtggacttgatgccgatgtcgatgattcgctcgatgcccttcacgtcgtccccggacttgcgggcatccatggtcagcttcgacacgaagcggtccagctgtgcgcggttcttgatgccagccttcgacgacagcgccgaccagccggtgatctcgcgcatgtagcgggtcatcaccgagtccacgtcgttgtcgaacaggtcggccatcgagacctgcacgtcctcgccagcctcgttgcggatggtggtggagtaggtctcgtcgaggtcgatgcgcttcttcgcgcggtcgagcttgcccgactcgtaggtcttgcgctccagcttggacagcagctcttgcgaccgcacgggcgagacgcccgcctcggtcagcatgttgccgatctcctcgaccgaatcgctgtccagcggacggaccagcaggtccatcccgtcgccctcgaagttcgcctgagcgcgcttgagataggagcgtgcaaccgccccgagcagctcgtcgtcgatctcgcccccttggtcggcagcggcctcccaggcacggcgcatggcgggcttgatgagctgctcgatcacgtcgtcctggtgaagctgcatttcgccaaaaaggcgcttgaagcccttgccgctccaatagcgcggtaggtagttgccgttctgcgccagctccgcaaagccttcaagaccactctccttcgccagtcgcagcgcgtcctgcatagccttggcaacggccgctgcggcggtcctcgcttcatcagacacgtcaggcgcaccgcgcacggcacggccaacctcctcgttgaacttggcgcgctcggagaagttccaccaatgcgtgcccgtccgttgcttgtaggcgtcccacgcggcgttcactccgctccgccattccgtctccatgacggccaggtggcgcttggcgaactcgctggtggactcctggaccgcgacggagcgatcggtgtagccgacgccatcacggaacagcaggcggcccgcctcgcgcaccagcggcgacttggcgctacccatgcgggcagcaaggtcgcggcggacggtggcgaagtggggcgtgatgtgcgcgttgaccagcgccttgtcggtgaactcctgctcgaatgcggtctcgttgcgcagcggaaggacgccgggcgtcgggtcggtggtggcggtgccagcaacgcgggcggccgacagcgagtcgtcaccagccagccgcttcaccacgtcaggcttgacctcgccatcgaacagggcaccccggcgagcgccgagggcaccaccgaacgcgaacgacagggcggcgctctgcacgccatccgcgagcgtctgctcggggtcgtaggtggaggttgcggccgacatcagcgcggaggtgcccgcagcctgtagaccggagcgcaccgcgttggcgaggcgtccggccttggctgcgtaccccaggccgcccgtggcgagatcgaggccggttgccaccgggtcggtgaagccgagggcgatctgtccgcccaggccgaactgcgccaggtcgtcgtccgccatctgattcatgaaggccacggattccagataggagaggtgctcgtcggacgtggcccggccgaacagctcccactgctccgggcgcaggcccatcgactcccagcgcttgcgcgcgtctgcgggaatgcgatagccctgctgcggttcgtagcccagttcggtgatgaagcggtcgatgaagccgatgccgccctttgcctgggcagcgccccatccgtcccatacggtcgtctgatccttccggcgctgcgcggcctctcgctgctccttgcgctcgcgcacggcttgcacgatgggctgctgggttgcgggcctgacggtgttctcgtcggcacctgggaggttctcaaacaagttcagctccttcaaaaaagattcggccacggcaaagccgccaagaccttccggtcgtggcgcgttgacgtaaagggggtgagagggggcgactatcgctgctcgacttgtggcggcagcgacgtcgtgaggggcacgctcagagagacggcacgcaactgcggggcgttcatgggtgtaggccgcagccgtcgcatggagcgcgctggtcgcgccagaagcctcgcataagggggtgcccggtacaaccctagcggagggtgagcgctcgggcttctatcgcgttctggcggctttgggattcaccgccgcagtggcacccaaggaggacagaggaacaccccaggagtgcataggaggactgtagttctactcggtggtgaataccaatgaatagaactctacagtcccactatagtaatacttaggtcttactatgataccagccttgtcaagcccctcgtagccaatgctccgtggtcgtatagacttagcggtcggcatagacagtacaacgggtatctatggcatcgctaaattcccgcctgattcgcttagcggcgcttgtcactgttctgtcggtggtctgtgctggagttccagctgcgtatcagcacgcgacgcttcgagcgacgcaggagttggtcgaaagtacccgcgaggtcataaacgatgacacgaccgcgccaaacgcggtggcggatgcggtgccaattctggattccgcactgaccgaggccgtccagcgcgagtgcatgagagacctacttctggaattcacgattggcgtcccgctgatcgtttggtttgtcgtcttggctgtaatgtggtggttcaaggatgaagaattggcgtgatagctgaactgttcactttcaggtagagtcgtttcctgtcttttaactggccgtcgtgtacggtacgaaccgtttggggaacgtaggcgtgggagaacgcgcgatggctacggatgcatacagccagggtcggctcggctcgttgttggtcatggaagatgatcctgacctctcagggatgttgaaggaaatcctggcgatgcagggttacgaggtcgatgtggtcgcctccgctgccgatgcattcgaccgcatagaggcgaaagcatttcacgcggcgatcttagacatccagacgcaggacggagcctcaatgtccgtcgccgattgcctgctgtcgcaccgaattccctacatgttcgcgtccggggtgccgaacccgcagctccctgacgctcaccagtgggcgacctttctcccgaagccgtaccgcatcaaagaactcatgagcgcccttgataggactcgccaaatcggcattcctgtttaggcgcgtccatgcgccagtagttcaggtccggcgttttaggaaacgctttgtaaccgtttcgtaggtctgcaccggaggaccgctgtagaggtccgtcgagcaggtgatcgtgggcggctgctgcgttgatgcgggaacaagttcacgccgattacgcctgggtgcgctcggtatcgtgtcgggcaatggcaaggtgcaatgccaatgcgccagcggcagtgcgttcatcggcccacggcgcgaccagtcgaagattctccggcagcaggttgagagagttaccgtccacatagcaaacgcggtagccgctcggtcggcccagcagaagccgcgccagcggggtgtgtgacccactcccaggaatggtcgctacgacatagcggtgtccttggccgtcgctgctcatgtatacgctcccggtaaggccgtagcgtcgcttggcgttattccatacgaccgcctcggtgactgtcggggtatcgctaccgtggacgtgtagtcggaccaagtggcggccgtcatgatccgtgaagtagtgcggggttggtgtctgcttcttcatagtctgcttttaggccctggcgaaagcgcacggcaaagccgccgaggcccgaaggcccagcactcgcagggttggcttggtggtggtggtgaggtggtctgaggatggacctacggggaacgggggggatcggcgatgcgctgattccccctactacgactagtaaatccggtgacctgccccccgttttccgggccaacctgatcttagtagagtccgtctcacaagaggacggacatgaagaagcgatacaccgaagagcagatcatcggcttcctgaagcaggcggccgccggcacgccggtcaaggagctttgccgcaagcacggcttcagtgacgcgtcgttctacctgtggcggcgcaagttcggcggcatggatgtgcccgacgccaagcgcctgaaggcactggaagcggagaacgcgcggctcaaaaagctgttggccgagtcgatgttggacaacgaagcgctgaggatcgtggcgcggggaaaatactgagcccgccgacgcgacgggctgccgtcgcggacgtgcgggcgaagctgggcctgtcggagcggcgggcctgccgggcactgggcttgtcacgcagcgtgttgcactaccagccgcgcatggcgaacgcgccgttgcaggccaggctcgttgcgttggcgggcgaacgtcgccggttcggctaccgacggctgcacatcctgctggaacgggagggctggatcgccaaccacaagcgaatctaccggctgtaccgcaacgctggcctggcggtgcgcaagcgccgcaagcgcgatcgcgtggccgtcgagcgccgtccgctgcagctgccgtcggggcccaaccacacctggtcgatggacttcgtcttcgacgccctggccaacgggcgcccgatcaagtgcctgacggtggtggacgattgcaccaaggaagcggtggaaatcgccgtcggccggaggataaatggccagaacgtggccgacatcctggatgcggtatgccgtttccgcggctaccccgcggcgatcaggaccgaccagggacccgagtttaccggccgggcgctggaccagtgggcgaccgccaacggcgtgacgcttgtgctgacccagccagggaaacccacgcagaacgcctatgtggagagcttcaacggcaagttccgggacgaatgcttgaacgaaaactggtttatctcgctcgagcacgcacgggcggtaatcgccatctggcgcaaggactacaacgaggtgcgtccgcacagctcactgcccaaatgcacgcctgccgagttcgccgccgcgctgcgcaacgaaggtgccttgactggttcgaccgctgatcgaaacctgacccaccggagcggtatgctccccaacctggactctactaagtagctagtggccctgagaaagggggcaggtcacgggagcgtggcggaacgaccgtcgcggcccttccctcacagatgactactatattccgcgcgtacctactaccggtgcgggaatccagtctctttccttgggattcagtccattacagcgtgcgggtgacgtaacaggtgacaggctagcaacatccgcaattcgctcaggtgactactaatccgggatcgcctatggagggctgaggcgggacgtcgcggtattcctccgatgatgtccgttatacccgtgtcgcacgcgctgccctactcggaagtccgaccgcagaaagagcacagcgcgcaggcgcccgcccacgggctgatcctgggggggggctgcccaaggagtggcaccggctggtcgtttgagcgcgttggcaagcgtccgtggggaggggcgacgtggcgctccctaccagccgccgcaggctcagctgatcgcctaagtcgccgttggagcccttcctggatcactcaaaatgtaaggggcgtcacggaagttgcataccgatagtcaaggggcaacaggtccgcgtccgaacacggcaagcaagtgtgttgtaagctgctcgcgaaggtcggcctcatcagtccaaactatatggcgaaactggcgcgtgtcgaaatgtagtttggggaggtcgtcctgccggacagtccacaccacggggcgacccaagccgagagcgaatccagcctcaaaatacgcaccggcattctgcgtcgtaacatcaacgatcactccgtacgaaccacggatgcccgcgatgatgcggtcatcaatcttgtcgttgtggtctacgctgtctacccgtcttgcgttgtatcccgctgcttcagccccgggcttgatgccattctcgtaggcgtcgcgaagtgcggggctaaacgacatagctacaaagaagtctgagcggtttcctcctacgggaaacctcagtcgttccagatactcccagccagcgggagttatcgtgtatgtcatgtttgcgccgcttaatagaccccgttccgtaagagagcggatgtgatagcgtagttcggtgatgttactggcgtctatggcatgtatatcgtttaggcccctcataacaccggcaccggggtgcttgctatcagccgcaatgtccaccagaagagcgttctgcttgctcgggacggtgttcagctcggggccatcgatctcgtcgaggagggtgctgtcaattacgtaatgcctgtgcgtgctcgcccaatgtcgtcgagcgcgaccagacagccagcctttcttatcactggaccagttcttgatgatggcttcggcagttccgctgacccggaataaccggcatgccgggcaattcacattggtggcacccccattgggggtatggatcgccccctcggtctcgcagatcgggcacggtgcgggaaattggctcatgtgctctcctcagtcccgcaatactaactgctcacggctggctccgtgcactccggtcacgctgctggcagtctctggctatcgcaccgcgtccggctagagcgccggggaagtggtgaaggtggatgtgccctgcgctgtttgcctatgcgaaactagtaaatcctcttggctgacaccctagtcgcgcccgtcgggtgcttcccggatgctgccatgcttcctgcccgcgttgatgaaaaatgccgccagtgcgcccaaaccccatagggccgacagcggcaacgcccaagcatgcccgcgaccgtatgcccacagcccgagaagcgggttgatgggggtcactcctgccacgagaaaggcagctaatagattcgccctcatggcttatgccgccagcagatgcgccgtagggtaccagccatgcgcgcagtcgcgatttccatgtgtctccttacagagcggacttggtgaccatagccgtcgcccacaccagcgcgaaggccaccgcgatgggataccagcgggtgcgcaccatcagttgctcgtggaagtggaggatgcgacgaaaaggcttcgggggctgcatgggtgtccctggctgcttcactcgttggcaattcgtcccgcttacgcagttgatcccgcaagtgggattaagttgtttcgtgtcagtaagttaagtctagcggagggggttgctacaagccatccctgtggtgccatcctcccatcgcgggccagcgaaaaagacagatagagccgcccgtagacataaacattaggagccgacatcgtggatattctgtatagcgtggactttcgccttccttttactccttggactttggcgctcctcccgcctgggccgggggagggtggcttctggatagcccgacggtccgaccgctgcacagtggtcggccttggtcgtgtactgctctacatcgaacgtcgtggcaggacgccgcttctgcgctactgcgggtagtggttcaccgggccggacagctcgcgggttcgccactggctgcctgggccgtcgcctctactacatccttcgcgcgttggcggtccgccgcgactgccgacgccgtccgccaaccggcttggccggccattggcgtggatgggtcacgcagcgcggccctcggtataaggcttctaagcggccttcggcttgaacgggacgattacatttcccgtgtcagcgcgcagggcgtccagatagtccgcccacgcctgcatcatcttccggcgctcgggaaggtggctcgtccgattgtaggcacgcccattgggatcgcggacggcgtgggccaactgatgctcgatcaggtccggccgccaccccagcacttcgtccaacagcgtgcgcgcagtggcacggaagccgtgggccgtcatggtttccttgtcgaaacccatgcggcgcagcgcggcggtgagcgcgttatcgctcaacggtcgcttgggcgaacggccaccggggaacacgtattggcgatggcccgtcagcggttgcaggtcgcgaaggatcgccacagcctgcgaggacagcggaacgaggtgcggctcgcgcatcttcatcttgtgcgcggggatgttccactcgcctgcatcgaagtcgatctccgaccactcggcatggcgtagttcgcctggacggacgaaaaccagcggtgctagtcggagggcggcgcgggtgctcgcatcgccagcatagccgtcgatggcccgcagcagcccgccgagttcgcgtggatcagtgatggcggcatggtgccgttccataggaggtgccagggcacccctcaggtcggccaccggattccggtcagcccgtcccgtggcgaccgcgtaccgcatgacctggccgcagttttgcatgatccggtgagctgactcgatggctccgcgttcttcaatgcggcgagccacgcgcaggaaatcgggggccgccaattccgcaaccggacgcccgccaatccacgggaatacgtcgttgtccatccaggcgacgaccttgcagcggtaggactccacccatttctgcttccccagccattcgcgggtcaccacctcgaagctgttggcggccttttccactccggcgaccttggcggccttccggtgttcgcctgggtcgatgcctgatgccaggagccgacgagcctcagcttggcggccgcgtgcgtcggccaaggagacttcggggtaggtgcccaagctgagcgtgttgcgcttcccggtcacgggtcggcggtagtcccaccgccaccaacgcgaaccatccgggttgagctgtacgtacaagccgccgccgtcccggagcttggtcggcttggggccgggcttggccttgcggatggcggtatcggtgagaggggcgacggtacgcggcatggcggtaactaatttggcggtaagcgtgttaccgccattcttaccgccaccgggagccgcatttcaagagaccaacctggaccgcgcgggacataaaaaaggccgggagccttgtgttgcaagggattcccggcctttcatggtccttctcggaccttcatatggtggaggtgggcggaattgaaccgccgtccgaaggcactccatccccagcactacatgcttagctcaccgttggatctcgtccccgaacagcacggtgcgcaaagcgcatccgggaaccagcctgttgtgttctagtgccggactgacaggcagccatccagcgcgattccatgatagtgactctacaccgcgagcatggacacaagcggtttcgaggcttaggccttaagcggccagagcgtagttgtcgtcgttggcaactagagttttgcagctggatttacgaggaaagctaccccctcggcatgcgccaggcgacttcacaacccccgtcgaaaccaatgcacccccggtgtcttcaagttctgcaaggtacaaggcctgtttcgtgtcgccacggccagtgcctgcccaacgctgccaatgctacgccaaaacagctgaacagtcaccgtggcaatccacaacatgttgtagagccagcggcatagcggattggtaacgtcactggcacgaatttgcgacacactggcggcgaccatccgggccaggacagacacggagactgtgggtgaccgatgcaagccaacaacgcagcctgcggcagctgatcgggccggtcggtgccgactaccagcggcgcgccctgccgcccggctgggtctgggcggtgctggcggtgttgcttgcggccaccgcactgaccgagctgccggcgactgcggccgcggcattggtggccagtgcggtggttgtgcactggtcgcagcgcggtcgcatccattggctgggctggcgcctgccgggcctggccgtgttggcggccctgctgtgggggccggaagtgctgtcgcaatggttcgagcacgggctggccgtggtcctgatgtcgctggccagcctcagcatcggcgtgcatgtatggcaggcgcgacagatggcgcggcagctccagggcgcggccgattcgctggatgacgcccagctgctggccctgctgccggccgacgcggcccagctggcgcagcggtggcgcgccggcgatgaccggcatgcgccggaactggcagtggtgatgcacctggccgtgatgcacgcagcgctggcaccgcgcatgcgcgggcagggcgtgctggcagggtgaccggtcggcggtttccgcggccgcggtcaggaacctgacaatggcttgcgcaggtagatccgctcgtgcccgggcgggcaatcgggcagccgcccatagacggtgtagccctgccgcaggtagaaagcttcggcctgccagtcgaaggtatccagcatcacgttgcgggcgccaagctggcgcgcggcggcttctgcttccgccagcaggcgctggccgatgccttgcccgcgcagttccgggtccacccacagcacatgtacctgcagccagccggcacagacgtcggccagcacaccaccgcgcagcgcgccgtgctcgtcatgccaggccaggcggactggagtctcatcgagtgaatcgccgccgtgggcctggttgaaggccagcaggcgcgcgcacaacgtgcgcgtttcatcggcgctggcagtcaccatggcgccgatgggggcggtcatgcgtcgcggttgccgcgacgcatcacacgctgcttctcgatcgcccagtcgcggtccttggcggcatcgcgcttgtcgtgggtctgcttgcccttggccagcgcgacttcgagcttgatcttgttcttgctccagtacatcgcagtgggcacgatcgtgtagccatcgcgctcgaccttgccgaccagcttgtcgatctcgctccggtgcagcagcagcttgcgctcgcgccggtcattggccaccacgtgggtggaggcctggatcaacggggtgatctgcgcgccgatcaggaagatctcgccgtgcttcacataggcgtaggcgtcgatgatgttgccgcggcccgcacggatcgacttcacctcccagccctgcagggccaggccggcttcgaagcgctcttcgatgtggtactcgtggcgggcacgcttgttcagcgcgatggtcttggtggccgtcgcgctctttgctttatccttgccgctgttcttgctcatttccgtattgtctccgattcgggcccgcccggtcgattgccgaaacgtcctgtattcatgcctactatccgccgcagcgccctggtcgaacattcggccgcgcgcatgttcgacctggtcaacgacgtccaggcctatccgcgccgtttccgctggtgctcggctgcccagatcctggagcagggcgaggaccgcctggtggcgcgcctggacctgggcctgggctcgttcagtacctggttccagactgaaaacaccctgcagcgcccgcacagcatcgacatgcagctgcgcgatggcccgttcaagcagctgcacggccgctgggaattccatgcgctggccgaggatgcgtgcaaggtcaccctgaccctggagttcgaacccagctcgcgcctgctcggtccggccctggcgatcggcttccagggactggccgatcgcatggtcaatgatttcgtccgcgtcgccgacgagggctgagcgatgatcgaggtcgaggtggtgctggcctggccggagcgcgtgctgtcgcgccacctgcagctggaagagggagcgaccgtggccgacgccatcgccgccgctgcgctggaaggtagtgccgactgtccggccgccgcggtgcatggcgtgctggcccgtccacagcaggcgctgctggacggggaccgcatcgagctgctgcgcccgctgctggccgaccccaaggacaaccgccggcgtcgcgcgctcggcggttgatcccggcaacccgtccctgcggacgggcaggcctcagcggcccttcttcttcttgtccttcggcaggttgcggccgaactggcgcaccgtctgctgggccagggccttgtcgttgcccgggaagtagtcgccttcccagcgggtaacggcgtcattctcgaagaacaccacgaagttcttcacttcggtgcggccgaggcggttcacgcgctggctggaggtgtagtcccagcgctgggcgtggaacgggtcggggatggacggggtgcccagcagcgcggtgacctgctgcttgctctgcccgacctgcagcttggccacggcatcttcccggatcaggttgccctgatagatgggttgcttgtagatgatgccgcacccggtggtggacagggcgacggcggcgaccaacaggagattgcgcatcgggactggcggttggggaaatcaaaccgatgatacactcccggcgtgccaccgcgacccaatccgaggcagctggcgctaaatcgccaatgaacggagacctatggaaacccacgacctgcgtaaagtcggcctgaaggtgacccatccgcggatgcggatcctggcgctgctcgaacagcgcaatgcccagcaccaccagcaccacatgaccgccgaggacatctaccgccagctgctcgagcatggcgacgagatcggcctggcgacggtctaccgggtgctgacccagttcgaggccgccggcctcgtgctcaagcacaatttcgagggtggccaggccgtttacgagctggaccgtggtggccaccacgaccatatggtcgacgtggacagcggcaagatcatcgaattcgaaagccatgagatcgaggagctgcagcgcaagatcgcggccgatcacggctatgagctggaagaacactcgctggtgctctacgtgcgcaagaagcgcaagtaggccgttccggccagccgctagcgacgaaaccccgggcttgcccggggtttttcgttgccggggtcagggccctttccctccaggaaagggggccggccccgggcgctctgcggggtcggatccctttgcgccagcagagggctctgaccccttgcaaccgagcaggatctccaggtccaccgcctcggccatcgcccggttgccggcatcccccgggtggaggtggtcgccggagtcgtaggcggcggccatccgtgacggatcggccgggtcgcgcagcgccgcgtccaggtcgatcaccgcgtcgaacgggctgttgctgcgcagccatgcattgagctgttggcgcagggcctccttgtccgggtggtagtagtcgtccagcggcgtgccgggcagggcgcccgcgaacggcatcagggtggcgccgaatatgcgtagaccccgccggtgggcctgttcggccagggcacgatagccggcctgcagctcgggcaggctgggccggggctgcgcgcgggcgaaggcagtaccgggccagctgatgtcgttgatgccgatcagcacgatgacgctggcgacgccgggctgatccagtgcatcacgccgcaggcgggccagaaccgactcgcccatgccgtcgctcagcagccgattgccggaaatgcccgcgttgaccaccgccaccccgcgcggggcgaggcgtgcggccaggtggtcggtccagcgctggtcctggtcgaggctggcggtggcgccgtcggtgatcgaatcgccgatcaccaccacgctacgcgcactggcggcgccctcgacctcgatcccggtcaggaacaggcgtgcggtagtggaactggcatcctgcaggtcgcgcgcccgggcctgattgccgctggcgatccagctggtctggcggccgtcccaatgaaacgtctgcaccggcgtcggccccggcacgaagacgctgacctgcagcgcctggtggtcttccgtggccaccgccagcggatcgctcagccgttcctgaccggcaccgatcaacaccccaggctggccgtcgaagctgagcggttgcggggtggcgcccgcgcccgcggccacgctggccgccccgatccgcagcggctgggtgccgtaggcattgctcagccgcacccgcagccgggacccgcccaggctgatgcgcgcggtctggcggaaggtctggtcctgcagcgcggccggaaccagggtcgggaacaggaaatccgcgtcccagaccggttgcgggctggcctgccagctggcgacccagtgcggggcggatgcggcactggcgacgccggacagggcgagcagggcggtggcggtgagctggctcaagcggttcatcgggcaatccaaggggaagggaacgccatggtgattccggggtcatctgtgaactagactgcgcatggacaatcatctgtgaactggattcatcgtcatggcgcgacccgacatcaaccgatccggcgaactggaagtgttcgtgcgggtgatcgagaccggtggcttctccgccgccgcacgcatcctggacatgacgccgtcagcagtgagcaagctggtggcccggctggagcagcggctgggtacgcgcctgctgcaacgctccacccgccagctgcagctgaccccggaaggctgcgcgttctacgagcgcggcctgcgcgtgctggccgacctggaggaggccgagcgctgtgccagtgcccatgccgagccgcgtggacggttgcgggtcaactccaacgtgccgttcggccagcatttcctgttgccgctgctgccggcattcctcgaacgcaacccgcaggtaggcgtggacctgaccctcaatgacgaggtgatcgacctgcttgagcagcgcaccgacgtggcggtgcgggccggtccactgaagagctccagcctggtggcgcggcggctgggtgcgacgcggatgatgatcgtggctgcaccggcctacgcgcagcggcacgggctgccacgcactgccgaggagctgcagtcgcacaaccggttggatatcggccatgcgcgcgcgatgcagggctggccattgttgcaggacgggcgcgaacgcatgctgctgcccagtggcaacgcgcgcgccagcaacggcgatgcgctgcgccagctggtgctgggtgggctgggcatggcgcggctggcagcattccaggtgcagcaggacattgccgccgggcgcttgctgccggtgctggaggacgccaatcccggtgacctggaagaggtgcacgcggtgttcctggggcagggcggctacctgccgctgcgggtgcgcgcgtttcttgatttcctggtggagaacgtcgatctgacgcagccacaggggtagtgccggccgctggccggcaacctcatgatcttcatccacccgcatcggggtgccggccagcggccggcactaccttgcggaagccgagccaatgctcggctcggccggcgttacacctgcagcagcttgcgtgcggcggcgcgcgcttccttgctcacttccacgccgccgagcatgcgcgccagttcttcctcgcgcgccttgctgtccagcttttccactgcgctctgggtcatgccttccaccggggccttgctgacccggtaatgggcatggcccttcgaggcgacctgcggcaggtgggtcacgcacagcacctggcgcttctcgccaagggcgcgcagcttctggccgacgatgtccgccaccgcgccaccgatgccggagtcgacttcgtcgaacaccatggtcggcactgcatccaggtccagcgcggccacttcgatggccagcgagatgcgcgacagttcgccacccgaggccaccttgcgcagggcacgcggtggctgtccggcattggccgccaccaggaattccacgcgctcggcaccctgcgggtcgggcttgccggcgtcctgcggttccagctcgatcaggaactggccgccgcccatgcccagctcggcgatgatgccggtggtggtggccgacagctcggcagcggcggcgcggcggctggcggtcagcagcccggcctgcacgcgccacgccgcagcggccttgtcgatctcgccggcgaggcgctgcaggcgttcgtcagcaccacgcagctgttccacttcggcgtgcatgcgctcgcgctgcgcgcccagctcgtccatcggcacacggtgcttgcgggccaggtcgtgcaggcggccgaggcgacgctcgttctcctcgaactgttccgggtcggcgtcgaggtcgtcatgcacgcggtccagcagcgacagggcttcgtgcagctggatcgaggcgttctcgatcagcccgtccacctcgcccaggcgcgggtcgtgctcgatcaggcgcgacagctcgtggcgcacctgctgcagcaggtccagtgcggaactgccgtcgtcgccgttgagctggttgctggccgcctggcaggcactcagcagggcgctggcgtgggcctggcgacggtggctggcaccgagtgcggcaatcgattcgggttccagatcctcgcggtccaactcgcgcagctggtgctccaggaagccgatccggtcactgacgtcgccctgctgcgacagcgccagcgattcatcgaccagcgcctgccaggccgcagcggcgcggcgcacctggcggcgctcgtcctcgttgccggcataggcatccagcagggccagctgcgaagggcgcgtcagcagggcctgctgctcgtgctggccgtggatctccaccagcagcgaggccaggtcgcccagctgcgccagggtcaccgggcggccgttgatccaggcccgcgatccgccatcggcacggatcacgcggcgcagttggcattgttcttcgtcgtccagctcgttgtcggccagccactggcgcgcggcctgcagctggtccagcgcgaactcggccgacagctcggcgcgcgcggcgccgtggcggaccacgccgctgtcggcgcgcaggccggacaggaagcccagcgcgtcgaccatcagtgacttgccggcgccggtctcgcctgaaaccacggtcatgcctggcccgaactccagttcggtggcgcggacgacggcgaaatccttgatcgaaagatgtctgagcatgggtaagggggtgtcagcagccgcgcaacgctagcacgcgggcgcgggaggtccaatgacttgccaaggtgatccgccgccattatctagtgtccgtgtctcacaggttgattccatgcacggttctcccgaccagcttgccccgcgtgcgcgccatctgctgcgcacgctgatcgcgcgttacatccaggacggtgagccggtcggctcgcagacgctggcgcgcgtggccgggctggaggtcagtccggccaccatccgcaacatcctgggtgacctggaagacctggggctgctggcttcgccgcacacctcggccgggcgcgtcccgaccgcacatggctaccgggtgttcgtcgacagcctgctgcagatgcagccgccgggcgaaggcgagctggcccggctgcggcaggaactggccagcggcggcagcacccaggccctgcttggcagcgcctcggagctgctgtcggcgatgagccacttcgtcggcgtggtcagcgcgccgcggcgcgagcagttcgcgttccgccagatcgatttcgtggcgctggacgggcgccgggtgctggcgatcctggtgttcgccgacaacgaggtgcagaaccgggtcatcgagacccgccaggagttcgcgccgggccagctggaacaggtcgccaactacctcaacgcgcatttcgccggcctgccgatggccgagatccgcacccgcctgctgctggaactgcgtgatgcccgttcggagctggagcagctgctggcgcacagcatcgagctggccgagcaggccctgcagccggcggccgatgacatgctggtggccgggcagacccgtctgatgggggtgcaggacctgtccgacctggagcggctgcgcgagctgttcgagctgttctccagcaagcgggagatcctgcagctgctggagcgcaccatccaggccccgggggtgcgcatcttcattggcgaagagaccgggatgatgccgttgcagggggtctcgctggtcaccgccccctatgccgccaatggccaggtgctgggcgtgctgggcgtgatcggccccaagcggatggcctacgaccggatgatcccgctggtccaggctactgccgatgtactcggcgcggcgttttcgccagccgggcgcactcctggaacatccgacgcttgaaacgcagcatcccgcccacactagggtgggtggaggcggagactgaccgccagggacccagacatgaaccacgaacatccagatatcgaatcccagcagactgccgccgatgcggccgccgccgccggcgtcaacgacgaagtggagcgcctgcgcgccgaggtcgagcagatcaaggccgatgcgctgcgtgagcgcgccgacctcgagaaccagcgcaagcgcgttgcccgtgacatcgagcaggcccgcaagttcgccaacgagaagctgctgggcgagctgctgccggtgttcgacagcctggatgccggcttgaaggcggccggcgatgacccgcatccgctgcgcgagggcctggagctgacctacaagcagctgctgaaggttgccgccgacaacgggctggtcctgctggacccgatcggccagccgttcaacccggaacaccaccaggccatcagccaggtgccggccccagacgccgccccgggcagcgtggtgaccgtgttccagaagggttacctgctcaacgagcgcctgctgcggccggcgctggtggtggtggccgccgactgacccctccagggccggaaggcgggaatgtcccgtcacccggcccgacgctgaacgcgccgggcgaccggaaacacagcgttcgggagatggcttgaatgttccacgagcctcccccacatcgtattcatccaccggccgaacggccggactgaccccaacaagcatcctcaggagtctcccccatgggcaagatcattggtatcgacctcggcaccaccaactcgtgcgtggcgatcatggacggcggcaaggcccgcgtcatcgagaattcggaaggcgatcgcaccaccccgtcgatcgtcgcctacaccaaggacggcgaagtcctggtgggcgcctcggccaagcgccaggccgtcaccaacccgaagaacaccttctacgcggtgaagcgcctgatcggccgcaagttcaccgacgccgaagtgcagaaggacatcgcccacgtcccgtacagcatcctggcccatgacaacggcgatgcctgggtgtcgaccagcgatggcaagaagatggccccgcaggaaatctcggccaaggtgctggagaagatgaagaagaccgccgaggacttcctcggtgagaaggtcaccgaagcggtcatcaccgtgccggcctacttcaacgacagccagcgccaggcgaccaaggatgccggccgcatcgccggcctggacgtcaagcgcatcatcaacgagccgaccgcggccgcgctggcctatggcctggacaagggcgacaacaaggatcgcaagatcgtggtgtacgacctgggcggcggcaccttcgacgtctcggtgatcgagatcgccaacgtcgacggcgagaagcagttcgaagtgctggccaccaacggcgacaccttcctgggcggcgaagacttcgacaaccgcgtcatcgagtacctggttgaagaattcaacaaggaccagggcatcgacctgcgcaaggatccgctggccctgcagcgcctgaaggacgctgccgagcgcgccaagatcgagctgtccagcgcccagcagaccgaagtgaacctgccgtacgtcaccgctgacgcctcgggtccgaagcacctgaacatcaagctgacccgcgccaagctggaagcactggtggaagacctgatcaagaagtcgatcgagccgtgccgcgtcgccctgaacgatgccggcctgcgttcgagcgacatcagcgaagtgatcctggtcggtggccagacccgcatgccgaaggtgcagcaggcggtgaccgaattcttcggcaaggaaccgcgcaaggacgtcaacccggacgaagccgtggcactgggcgctgcgatccagggcggcgtgctgggcggcgacgtcaaggacgtgctgctgctggacgtgaccccgctgtcgctgggtatcgaaaccatgggcggcgtgttcaccaagatcatcgagaagaacaccaccatcccgaccaaggcctcgcaggtgttctccaccgccgaggacaaccagtcggccgtgaccgtgcacgtgctgcagggtgagcgcgagcaggcccgcttcaacaagtcgctggccaagttcgacctgtccggcatcgagccggctccgcgtggcctgccgcaggtggaagtgtccttcgacatcgacgccaacggcatcctgcacgtgtcggccaaggacaagaagaccaacaaggaacagaaggtcgagatcaaggccggttcgggcctgtccgaggaagagatcgcacgcatggtcgccgacgcggaagccaaccgcgaagaagacaagaagttccaggagctggtgcaggcccgcaatcaggccgatgccctgatccacggcacccgcagtgccatcaccgagcacggcagcaaggtcggcggcgatgtcatcggcaaggtcgaggcggccctggccgacctggaaaccgcgatgaagggtgacgacaaggcacagatcgaagccaagtcgaaggtgctggaggaagccggccagtcgctgttcgccgctgcttcggccgaccagggcggtgccccgggcgccgacgccggcaacgccggcaaggcgcaggacgacgtggtcgacgccgagttcaccgaagtcaaggacgacaagaagtcctgatccggaccgacacgggacgctggccatcagcgtcccgttgtcgcatcagggtcctgaccgcccaccggcgtgtcggggcgcccgacgcaagagcggacctggttccgctcttccgctttgacgaatcccgactttccggaaccagattcaccatatgagcaagcgcgattactacgaagtgctgggcgttgcccgcaccgccaccgacgacgagctgaagaaggcctaccgtcgctgtgcgatgaagttccacccggaccgcaacccgggtgatgcggcggccgaagcctccttcaaggagtgcaaggaagcctacgaagtgctgtccgatggcaacaagcgccgcatgtacgacagccacggccacgccgcgttcgagcacggcatgggcggtggtggtccgggcggcccggacatgaacgatatcttcggcgatatcttcggcaacatttttggcggtggcggcggtgggccgcgccaggcccgtcgcggcgccgacatcggctacgtgatggagctggacctggaagaagcggtacgcggcgtcgagcgccgcatcgagatcccgaccctggccgagtgcggcgactgcgatggcagtggctccgaagacggcaaggtcgaaacctgcaatgtgtgccatggccgcggccaggtgcgcatccagcgcggcatcttcgccatgcagcaggcctgccacaactgcggcggccgtggccagatcatcgccaagccctgcaagacctgccacggcaacggccgtgtcgaggaagacaaggtgctgtcggtgaaggtgccggcgggcgtcgataccggcgaccgcatccgcctgcagggtgaaggtgaggccggtccggccggtacgccgccgggtgacctgtacgtggaagtgcgcgtgcgcgagcatgcgatcttccagcgcgatggcgacgacctgcactgcgaagtgccgatccgcatctcgcaggcagcgctgggcgacaccgtacgcgtggcgaccctcggcggcgaagcggaaatccgcatcccggccgagacccagaccggcaagctgttccgcctgcgtggcaagggcgtgcgttcggtgcgcagccgcagcgagggcgacctttactgccgcgtggtggtggagaccccggtcaacctcaccaacgaacagcgcaagctgctggagcagttcgaagccacctttgtcggcgaggaagcacgcaagcattcgccgaagtcggcgacgttcatggatggcgtgaagggcttctgggaccggatgacgtcctgagtttttcaaccgaagcgttgagcggtagcgccgggccatgcccggcgttttcgtttgcgatcagcggaaaaacgccgcgggcgtctgccccagttggcgcttgaacatgctggtgaacgcgctggggctgtcgtagcccatcgccagcgccacatcgatgaccttgtcgccgactgccagccgctccagggcggccagcaggcgcgcctgctgccgccactgcccgaaggtcatgcccagttcgccggcgaaatggcgctggatggtcttcacgtccacctgcagggcctgggcccagtcctgcagcgtggcgtcgtcggcgggatgcttctggatgtgctggcagatcctctgcaggcgcgggtcggtgggcgagggcaggtgcagcggcagcacgtccatgcggtgcagctcgtccagcagcaggcgcaccacgcgaccgtcgcggctgtcgtccacgtgcgcggactcgatcaggctggccgccagcagtagttcgcgcagcagcggcgccacctgtactgcgaacgccccatccggcagttgcggtgcaaagtccggttccacgtacaggctgcgcatgtgcacctcggcgatgcagtccaccgcatgcaccatgccggccggaacccagatcgcgcgggtggagggcacgacccagcggccaccgtccgcgcgcaccaccatcaggccggacatggcgaagaccagttggtgacggcgatgccggtgtggcgcgatgtgggtaccgggcgggtagtgccgggcgcggctggtcaccgggcggtgtaccggcacttcgttccacggcgcggtctcgcggatcgggcacggagtgtcctttttgcgataggccatgacccgaacgcggcagaagggagtgggggcccaccgtagcatgcgtggctcgcccccaacctgactgtgtccatgtcgaccctggcttctcccgcaacgacctcacgcccggtggctcccggcgtgctggccgccatctccacctcgcatgtcgtcaacgacatgatgcagtccctgatcctggccatctatccggtgatcaagggcggcttcaacctcagcttcacccagatcggcctgatcacgctgacctaccagctcaccgcgtcgatcttccagccgttgatcggcatggccaccgaccgccgcccggcaccgtactcgctgccgatcggcatggcctcgaccctgtgcggcatgctgctgctcggctttgcgccgaactacgcggtggtgctgatggctgcggcgatggtcggcattggttcggccatcttccacccggaggcctcgcgcatcgcccggctggcctcgggcggtcgccatggcttcgcgcagtcggtgttccaggtgggtggcaacttcggtaccgcgctggggccgttgatcgctgcggccgtgatcgtgccgtatggccagcgtgccgcatcatggtttgccggcgccgcgctgatcggcatcgcgctgctgacctatgttggccgctggtatgcactgcacctgggcacaccgcgtccggccagcaccgcgtctatggccccgcggcattcgtcgcgcaccgtggccaaggtgctggcgatcctgctggtgctgatcttcagcaagtacttctacatggccagcatcggcagctacttcaccttctacctgatccaccacttcggcattccggtggcacaggcgcaactgcatctgttcgcgttcctggtggcgtctgccgccggtggtttcctcggcggcccgctgggtgaccgcatcggccgcaagccgatcatctggacctcgatcctcggcgtggccccgttcgcgctgatgctgccgcacgccgatctgctatggaccacagtgctggcagtgctgatcggcttcgtgctctcctcggcgttctcggccatcgtggtgtacgcgcaggagatgatgccgcaccgcatcggcatggtgtccggcctgttcttcggctttgcattcggcatgggcgggcttggcgcggccgtgctgggcatgctggcagacaggaccagcattgaattcgtctatcagctgaccgcgttcctgccgctgctcggtatcgtcgcagcgtggctgccaccgtcgcggcctgctgctcactgaggggtttgggtttgcagggcttgcagccctgcacctgcagaggcaacgtcaacagcagaagcgggctatccgtgggttggcggggtggggccggttgcaggggacgccgtaaacccatccctgggggcttggccgcggcatccatgccgcggacacccctgcaaccggacccaccccgccttcgacagttttccgtgatctgccggaacagctcgtggggtcagatccgttttccgaaggaaaacggatctgaccccgatttatttcggtatcccacagatgtgccgaccaacggtcggcacccaccaacagtcgcgggaatctgtcagaggcggggcggtgtgggtgggcagaaccgttggcgccatggatggcgccatcgagcccccatgggtgagggcgcttcgcttgcgaagcactgcttcgcaagcgcccgaacgcacagccgccagcggctgggccggaccccggaggggggtttacggcgtgtcctgaccacccacaccgccccgccatcccacggaatgcggctcttgatcttgcttcggcttcgccttcggcaggtgcagggctgcaagccctgccgaaaactcccttgggcgtagaatgcggccatgagcgaatcccttgataaccacctggtccacggccgccgccagcggccggatgggccgtcgccgatcgatgtcatctcggtccagtcgcaacttgtgtacggccacgccggcaacagtgccgccgtcccgccgatgcgcgcactgggcgtgcgcgtcgccgaaatcccgaccgtgctgctgagcaatgcgccgttctacgacactacgcggggccgcgtgctgcccgccgactggtttgccgacctgctgctgggtacccacgagcgtggcctgccgcagcgggcgaagatgctggtgtccggctacttcggcagcaccgccaacggtgcggccttcgccgactggctggacaacatcctgccggcctgcccacagctgcgttactgcctggacccggtgatcggtgatacccataccggaccctacgtggaaccgggcctggaagcgatcttcgccgagcgcctgctgccgcacgcctggctggtgacgcccaatgccttcgaactgaatcgcctgaccggcatgccggcactggccgaggccgatgccatcgccgccgcgcgcacgctgctggatcgtggcccgcactgggtgatcgcgcacagcgtaggcggcaacccgggtgagctggtcaccctggcggtcgggcacgaggaaacctggcgctggacctcaccgctgctgccggtggacgtggccggtaccggtgacgtgctgatgtcgctggtggtgtcgttcctgctgcgcggtgagtcgatgcagcaggcgatttcgcgcgcgattgccggcacccatgcggcgctggaggcgaccctggacaacggcttcgaggagttcgacgtgatcgctgccgcgccggcggcgctggccgaaggaacgcgcttccgcgctgaacgcgtggcatgagcggcctggatccacgcacgccgcgcacggtcggcatcgtcggcagtgctggtgcctatgggcgctggctgtgccgcttcttccagcagcacctgcagctgcaggtgatcggccatgacccggccgacccggactcgcacacgccggaacacctgctggcgcaggccgatgtactggtgttctcggcaccgatccggcacacgccggcgttgatcgccgagtacgtgcggcaatcggcgggccgcgagcagggcaggctgtggctggatgtgacctcggtaaaggaggcaccggtgcaggcgatgctggcctcgcaggccgaagtggtcggactgcacccgatgaccgcgccacccaaggcgccgaccctgaaggggcgggtgatggtggtctgcgaagcgcggctgcagcactggcgggcatgggtcgatatgctgtgcaccgcgctgcaggccgagtgcgtgcgcgcgacgccgcagcaccacgaccagatgatggcgctggtgcaggcgatggtgcatgccacccacctggcgcaggcaggcgtgctgcgccagtaccagccgcagctgggcgatctggccgcgatgatgccgtaccgttcggcgtcgttcgagctggacacggcgatcatctcgcgcatcctgtcgctgaatccggcgatctacgaagacatccagttcggcaacccgtacgtggcgccgatgctggagcggctggtggggcagctgcaggccctgcaggtgcaggtcggacagggcgacgacggcgcacgggctgcattccgtgagcagctgctgtcagccaatcgcagtgccttcggcgagcaggccctggcggatggcaactacacgttcgaacgcgtggggtatctgctggccgatctgaccgagcgcaacgcgctgtcggtgcacctgccggaggaccggcctggctcgctgcgcgagctgttgaacgtgttcgagcagcatggcatcagcctggcttcgatccattcctcgcgcacgcccggcggtgaagtgcacttccgcatcggattcgtggccggcagcgatccggcggcgatcacccgggccgcggccgacgtggacgccagcggcatcggacgggtgctgggctgaattcatccacaggcggtgtggatggtttctgagcaaacgtgtggataaccctgcgcagcccttgtcaggcaaggctgtcaagatgcttggtgaaaaattgatcacgccttcttgtggagtccagccgtgctcgactgcccttggcaaagagcgtgttgaccgaggtcgacacctaccagagcagagcgacacggccagtgaccaccaaggtgggcagcgctagatcatcaaccgcagttcgccgccgctggtggtgaattcgcggccattgcgaaccagatgacgcccgtcatccagctcgtaacgcggcgtggattcagagtgatgcccgctgccattcgcctcgggcttgaactcgatgatgatgtggctttcgccattgctgtcgactgcagggaactgacggaacgacatcgcgtacctccttcagcggatgctgctgatgcgaggccagcttggtccggccgatgttagccggccgtcatcaatcgatgaactgcagtcgtgccagttcagcgtacagtccgccttcggccagaagctgggcatgggtaccttcggccacgatgcggccctggtccatcaccacgatgcggtcggccttgagcacggtggccaggcggtgggcgatgaccagcgtggtgcgaccggccatcagccgctccagcgcctgctgcacgctgtgctcgctctgtgcgtccagcgcgctggtggcttcatcgagcagcaggatcggcgcgtccttcagcagtgcgcgggcaatcgccacgcgctgctgctggccaccggacaggcgcgcaccgcgttcgcccaactcactgtcgtagccctgcggcaacgcgcgcaggaagccatcggcctcggccgcatgcgcggcagcttcgacctcggcgtcactggcctgcaggcggccatagcggatgttgtcgcgcgcactggccgcgaacagcgtcggctgctgcggcaccagcgccagctgcgcgcgcagctcggccggatcgacctggcgaacgtcgatgccatccacgcagatgcggccgctggccggatcgtggaagcgcagcagcatcgacagcaccgtgctcttgcccgcgcccgacgggccgaccagggccaccgtctcgcccgggcggacatgcaggttgaagtggtccagcgcggcctggtccggacgttgcggatagtggaacaccacgtcgtcgaactggatttcgccgcgcaatggttgcggcagaacgtgcggctgcgccggcgcacggatctcgatgtcttcctgcagcagctcgccaatgcggcccatgccaccggctgcacgctgcagttcgttccacacttcggccagcgcgcccaccgagccgccgccgatcagcgcgtacagcacgaactgccccagcgtgccggcactgaggcgcccgtcgatgacatcgtgcgcgcccagccacagcacgccaacgatggcgccgaacaccagcaggatggcgctggcggtgaccagcgactgcgcaccgatgcgtcggcgcgcggcgccgatggcatcgcccagtgccttgtcgaagcgtccgcgctcgtaaggctcgcgtgcatgtgcctgcaccgtgcgcacggcgcccagcgtctcgctggccaggctgttggcatcggcgatgcggtcctggctgctgcgtgcaaccgtgcgcagcttgcgcgcgccgatgatgatcggcagtaccgccagtgggatgccgagcagcgaccatgccgccagcctggggctggtgacgaacagcatggccaggctgccgaccacggtgacgctgctgcgcagggcgaccgacatggtcgagccgaccacgctgcgcagcagttcgctgtcagcggtcaggcgcgagaccagttcgccgctacggctgcggtcatggaaaccggcaccgagctggatcaggtgtgcgtacaggcggctgcgcaggtcggccacgactttttcgccaagcagcgacacgaagaagaaccgtgcggccgttgccagtgccagcaccaccgccaccagcatcagcagggcgaaggcacggttgatctggccaccgctggtgaagccgtggtcgatcatctgcttcacggcggggggcaggctcagcgtggcggccgaagagaccgccagcgccagcagccaggcggtgaacagcccgctgtggcggcgcacgaacggccacagcgtcctcaggctgccgaggcggcgcagcggtggggccgaggcgggggcgtcgtccttgtcagtcatcctggtcgtcgtcttgtatgcggatacggtcacgggtggcgtcgcgcaggcggattttcaatgcatcgacctgatcggccggcaattcgacccgcaggcacacgccgttggcatcgaactgttcatcgcgcttcacggcgccgaagctgggaagggtggcatgcagggtgcccagatcctcgaagccggccaacagctgcagccgggccatcgccaccagcggcaagcgcggggcggtacgcaggcattcggcggcggcgccaccgtaggcgcgcaccagtccaccggcgcccagcttgatgccgccgaaccagcgcgtcacgaccaccaccacccggtcgaagccctggccgtcgatcgcagccaggatcggccgcccagcggtgccggcgggctcgccatcgtcactggagcggtagtcctggccgtgccggtaggcccagcagttgtgggttgcgtcggctacggccacctgttgcaggaacgccaatgctgccgcggcgccatcgatcggcgcggcatggacaatgaagcggctgtgtttgacttccagcgtgtggcttaccggctgggcgagggtatcgggcattcccgccattctacggggtcgccggaggtcactgcccgcttcagtcgtccagcagcgggcgcaggtcgcgcggcaggcgcgcttcgggatactgctgcacatagcgctccaggctggcgcgtgccaggtcgcgctgaccgtcatcgcgccgcgcgcggatcttctgcagccactgccgtcgcggcagctgtgcatcggcgtccacctcggcctgcacggcatccgcactgagccgcgcgtcggcgccccggcgcatgacgccgggcgcggagcggctcggggcctgccgcttcatcgaggtgatctctacccgatccagtgcctgcgcccgttccgcatcggcagcgttggccactggcgcctcggcgctgcgtgctttcagcgcccctgccggggccggcgccaatgccggtgcaggtgccgaataggcagccggtgcgggaggcgcgggcggtgccgctgccggtgcggtggccggaccaggcgggagcgcggcaaaggacgtatcggcggccgcatccgccgccatcgatcgtgcagcctgggccggagcttcagcagtctcggtcggcgcaggcttggctacccgcgcgacggacggcgccgggggagcggcaacaggagccgcctcgggtgctgcaggttcggtggccgtttccgatgcggcaaccgcgctgtcggctggactgctcccagcggcctgatcggcggccgcggcgtctgccgcagcgggcgccgcggcaacagcggcctcgcctgccggaaccggcggcggttccgggcgcagctgccaggcgatgccgatggcgaacaccatcgaggcggcgatgccgaacaccgccggccaacgcggacgtgtgcgctgcctgcgcggcgcctcggcggagacagcagcatcggccgccggtgcgtgcacggcagcgcgcgccgcggccaggatggtggcgtccagcgcggccggcggggcctgttcgacgcgacggccgagcaggcgcgccagctcgcgttcttccggcgtcagcggttggtctcggttcatgcgttcaatcccgcacgcagcttgtccatcgcatagcgcagccgcgatttcacggtttcccggcctacgccggtgatctggccgatctcctccaggctcagttcctgatccagccgcagctgcagcacttcgcgctgctcgggcggcagttgctccatcgccagctggatgcggcgacgttgttcgaattcggaaagctcggcttccggggtctgcccgtcctcgatcgcggccaggcgcaggtcggcgtcggccggtgcggcagggcgatggcgagcggcccgccagtggtcgttcaggcggttgtgggcgatgcggaacagccaggtgctgaatgcagcgtcaggctgccagcccgcgcgcgcgctgatcacccgctgccagacatcctggaagatctcctcggccagcgcgttgtcgcgcagttgccgcagcaggaagccgaacaggcgcttgcgatggcgtgcatacaggctttcgaacgcgcgcaggtcgccaccggcccaagccagcatcaaggcttcatcggttggcagtgcgctggcttccacggcgtacagggtaaggcctgcaggcggtggcgcatagccggtgacgggggcgggcagggcgaggttcatggcgtggaagcggctacgggcaggaggaaaaacgtacgggcgcacgattcggggtttacgggcttccattgccccccgggtggcgcgctatgctcggcggctcaggggaggcgacgcacagacggcgccaagagattgtcatttgtccacgcacgttgaaccggcggaagagccaccacacgaggccgtgctgagcgcggcgctggtgcgcgcattgcatgcgctgctgccggactcggccgtggtccgcgttggctgggatgacccgcagctgggccgcggacagggcggctggccggctgtcgcggcggccgacgcgttgacggtgcccggcgtgggcaacggttgccatggctgggaatatgacggtgcccgcctgcagttgtcggtcgaaggtgccgtgccttcagcggcgtggtgggggctggcccggcaggccatggagctggcgctgcagcgcggtcgccaagccgggcagatcaaggcgctggaagaagctgaacggctgcagcaggcgctgttccagatcgccgatctggctggcgccgacctcgagatgtcggagatgctgcgtcacgtgcacggcgtgcttggcacgctgatgtacgcggaaaactgctacatcgtcgagtacgacgatgtccgcgaccagatccgcttcctgtacttcgccgaccaggtcgatgacttcgtcgccgatccgtcgcagagccatgacgccgatgagatgccgcgcagcctgaccgtggcgttgctgcgccacggcaagccgctcagcggcccctcgcgcgagttgctggcgcgcgtggtcgagcaggagcacgacccgcagcgtggaccggagagcctggactggctgggcgtgccgatgctgcgcgatggccgggtatgcggcgccatcgtggtgcagagctatgagctggcggcccgttatggcgaggccgagcgggcgctgctgggttttgtcgcgcagcacgtgcagaccgcgatggaccggcgccaggcgcaggtccggctggaacagcaggtggagcggcgcacgctggagctgcagcgtgccaaccacagcctgcaggatgaagtggccgagcgccgccgcgcagagcagctgcagaccgcgctgtacaacatcgccgagatggcgatgtcggccgacagcctggcccagttctacgggcaggtgcatggcgtggtcgggcgcctgcttgacgcgcgcaatttctacatcgcgctggtgaacggggccggcagcggcctggacttcgtctactcggtggacgagcacaacgccagccgtgcgccacgcccgttcagccgcggcctgaccgagtacgtggtgcgcaaccggcgtccgttgctggcttcgcggcagcagatcgacgcactgctggccagcggcgaagtgcgcgaatcgggcgcacgttcgcattgctggctgggtgtgccgctgctgcgcgatgacgaggtggtcggcgcgatcgtggtgcagagctacagcgagaacagcacgttcagcgtgcacgatcagcgcttgttgaccttcgttgcacagaacatcggaaccgggctggcgcgccagcgcgaccagcagcagctgcgttcggcgcatgccgagctggaaaagcgcgtggaggaacgtacccgcgagctggccgaggtcaacgagaagctgctcgggcagatcggcgagcgcctgcgtgccgagcagcgcctgacccatcaggccatgcacgatgcgctgaccggcctgcccaaccgcctgcacctgctcgatcgcctgcaggatgcgctggcgctggccaagcgcgagggtgggccggtgttcgccgtgctgttcctcgacctggaccgcttcaagctggtcaacgacagcatcggccacgctgccggcgatcgcatgctggtggaggtggctaagcgcatcgtatcgatggccggcaccgatgacgtggtggcgcggctgggcggcgatgagttcgcggtgctgctgcagtgtccgcaggggctggcacaggcgctggagttcggccagcggctgttgctggcactgcaggaatcgatgtggatcgccgggcgcgaactgttcccgtccggcagcctgggcatcgccttgtggaacccgcgctaccggaccggtgaagaactgctgcgcgacgcagacgcggcgatgtaccgggccaaggcgcagggtcatgaccgctgcgcgatcttcgacgaagacatgcgcgaagaagcgatgcgcagcctggacctggaagcggatctgcggcgtgcgatcaacaaccgcgacttcgtgccgttctaccagccgatcgtgcgcctgtccgatggcgaagtggtggggcacgaggccttgctgcgctggcgccacgagcgtcgtggcctgttgctgcccggggcgttcctggagctgggcgaggaaagcggcctgatcgagcaggtcgactggctgatctacgaacaggtcatcgcgggactggccgaaggcggccacggctatgtctcggtgaacgtatcgccacgccatttccgctcggtcgagttcagtggtcgcctgttcggtctgctcgatgcatgcggcgccgacccgcgccggctgcgcctggagattaccgaggtggcgctgctggatgatggcccgcacacgctgcgcatcctgcagggcctgcgcgagcgtggcatccaggtgcagctggacgatttcggtaccggcttctcggcgctgtcctacctgcaccgcttcccgatcagcacgttgaagatcgaccagagcttcatcgccggcctgcatgggccggaagtgcagagcacgcgcgcgctggtcgagggcgtgctgtcactggcccgcaccttgggcatcgaaaccatcggcgaaggcatcgagaccgaagcgcagcggcagacgctgcgcgaacttggttgcgactacggccagggctacctgctgggccgcccggcgccgtgggacggcgcggtggcctgagccaccgcgccgggtcgcctcagcgcagggcggagcgacgcttctcgtcgatccacttggaagcctgggccggctggtagttctgcatccactccagcatttcctcgatgtccgagccgtaccacaggtcctggcgctggtccggatgcaggaagcgctcttccaccatgcgatcgatcatgccgatcagcggggcgtagaagccttccacgtcgaggaaggcgcatggcttgttgccgatgcccagctggcgccaggtcagcatctcgaagatctcttccatggtgccgaagccgccgggcagggcgacgaagccatcggcgaggtcgaacatgcgcgacttgcgctcatgcatcgaaccgacgatctccagttcggtcaggccgcggtgggccacttcccagtcggccagctggcgcgggatcacgccggtcacctccccgccggcggcgagcacggcattggccacggttcccatcaggccgacgttgccgccgccatacaccaggcgcaggccgtcacgggcgatgcgatcacccagggcaatggcgcgttcggtgtaggccggcttgctgccagcgttggaaccacagtacacacagatcgatttcatggatcttcctgtctcttggccggaaacgaaaacgccccgtcgccaaccgcagggcggtcagggacggggtgtcggtggattatgaggccttgacaggccttctgtagagccgagccacgctcggctgcgcttcgttcagatcgcggcaaaggctgagtcgagcatggctcgactctacaaacgccaagcaggcttacgcggcagccgcctgttcgcgacgcgggccttcacgcagggcgcggcccaccatgccgaccagcaggtccagctcatcgctgtccatgccgaagtgcggggtgaagcgcagcgaattctcgccgccgtggatcacgttgatgccgtgctggcgcagccattcctcggtggaattggcgccgtagcacttgaactgcggggccagctcgcaggagaacagcaggccggtgccctgcaccttggtgatcaggccacccagttcgctcttgagctgttccagcttgcgcacggcctcggcaccgcgttcggcgatgttggcacgcacctgcggggtcagctgcgccagggtggcacaggccacgtccagcgcgcgtgggttgctggtcatggtgttgccgtagatgcccttgcggtacagctgcgcggcgtgctcggtcaccgccagcaccgacagcgggtactgcgcggcgttgagcgccttggagtaggtctccatgtccggcggatccaggccttcgaagcccgggtaatcgaccaccgacagcacgccatgcgcgcgcagaccagcctggatcgagtccagcagcagcaggctgccgtgcgcacgggtcagctcacgggccacggcatagaacgccggcggcaccgaacggcccgggtcgccttcgcccattaccggttccaggaacaccgcctcgatgaaccactggttgcgtgcggcgtcctcgaacaccttgcgcaggccggcctcgtcgtacggcgccacggtgatcaccgaatcctcgccgcggtagctggccaggtgctgcatgtagctcttgcggctggaatcggaatacagggcagggcggtcggtacggccatggaagctgcccttgaccaccacgcgcttgatcgtggcgccggcgtggcgcgcgcccgggtcggtctgcagcttggcgttgacgtcggcgatgcgcgcggccaggccaaccgcctcggagccggaattcaggcacatgaagcgcgcgaacgggcagccgccacggcggtggccgatctcggcgcgcagggccgtgatgaagcgctgctgcgacaggctgggggtcatgatgttggccatcacctgtgggcgtgccatcgcctccagcacggcatccggggtgtgcccgaagccgagcatgccgtagccgccggcgtcgtacagcaccgcgcccttcagggtgaccacccaggggccacgcgcggccagcgccacgtacggggtcactgcatcatcggcgtagaaattgacgaagccgtcctgcatcgcgtcgatctgcgcctgttcgtcctgcgccagcagcggccccaggtcggcctgcacgcgcgcgaactcctcggcggcggcatccactgcggcgatcagctgcgggtggcggacggacagggcggtcagggtggcgtcgtccaggccggtggtgaggcgggtgccgggctgggtgcgcaggggggcgaggcgttcgatgaagctcattgcagatctcctgaaacgatgggtcgcacgggccttcaaaagcaaaacgcgcgtcaacgcgcgcttgggggcaggctcgtgcagcggacttccgactcgatgctagcacttgtttttttgcgcgataaccccgcaaaaacctgctgcatagcagcattttgcgcgacgttcgccgcgaagcacgccggctcgcagacgctggacgtacaatgcgcgccattgtcgacctgttgccgcccactgccttgaagaagtccgatttcaactacgacctgccggccgaactgatcgcgcaggcgcccctggccgagcgttccgccagccgcctgctgctggtgccgcaagcccccgccgcattcaccgacctgcaggtgcgtgaccttccgtcgctgctgcagccgggcgacctgctggtgttcaacgacacccgggtgatcccggcgcgcctgttcgggcagaaggccagcggcggccgcgtggagatcctgatcgagcgcttgctcggcggccagcaggcccgtgcccaggtgggcgccagcaagtcgccgaaggccggcagccgcatcgcgctggatgccggtggcgaagccgaggtgctgggccgcgatggcgagttctacgtgctgcagttccacgtgcccgagtcgctggagcagtggctgctgcatgccggccgcctgccgctgccgccgtacatccagcgcgagccgggcgtggacgaccgcgagcgctaccagaccgtgttcgcgcgtgaagtgggcgcggtggcggcaccgaccgcgggcctgcatttcgacgaaccgttgctggccgcactgaaggaaaagggcgtggagttcggccacgtcaccctgcacgtgggcgcgggcaccttccagccggtgcgtgccgaagacctgaaggaccacgtgatgcaccgcgagtggctgaatgtcggtgccgaactggtgcagcaggtgcggcgcacgcgcgccgccggcggccgcgtgatcggcgtcggcaccaccgtggtgcgcgcgctggaaagcgcgatgcgcgatggcgagctgctgccgttcgccggcgagacgcagatcttcatcacccccggctaccgcatccgcagcgtggacgcgatggtgaccaacttccacctgccggaaagcacgctgctgatgatgatctccgcgtttgccggcaaggagcgcgtgttcgaggcctaccagcacgcgatcgagcagcgctaccgcttcttcagctacggcgacgcgatgctgctgttcccgcaggcggggtagcgcgccccgggagggcaggggccccctgtgggtgcgcaccttggtgcgcacgccttcttgggagacaataggcaactatttgccccaatgaccgctccatgtcccgactgcagttccagctccagacccgcgacggccgtgcccgccgtggccgcctgaccttcccgcgtggcacggtggaaacgccggccttcatgccggtggggacctatggctcggtcaagggcatcctgccggaccaggtgcgcgcgctgggcgccgagatcatcctcggcaataccttccacctgtacctgcgcccgggcctggacatcatcgccgaccacggcggcctgcacggcttctgccgctgggatggcccgatcctgaccgactccggcggcttccaggtgttctcgctggcgcaccgccgcaagatcaccgagcagggcgtgaccttcgcctcgccgaccgacggcgcacgggtcttcctcggtcccgaggagagcatgaagatccagaaggtgctcgattcggacatcgtgatgatcttcgacgaatgcaccccgtacccggccaccgaggacgttgcccgccgttcgatggagttgagcctgcgctgggcgcagcgcagtcgcaacgcgcatgacgaactgggcaacgacgcggccctgttcggcatcgtccagggcggcgtgcataccgacctgcgcagccgctcggccgatgccctgcaggcgatcggcttcgacggctacgccatcggcggcctggccgtgggcgagccggagcacgagcgcaacgccatgctcgaccacctggacccggagctgccgggcgaccgcccgcgctacctgatgggcgtgggccggccggaggacctggtcgagggtgtcgcacgtggcgtggacatgttcgattgcgtgatgccgacccgcaacgcccgcaacggccactatttcacctcgttcggcaccgtccgcatccgcaactcccagtacgcgcgcgacatggacccgatcgagccgggttgcggctgcgtggcctgcaccggcggctacacccgttcctacctgcgccacctggaccgctgcaacgagatgctggcgccgatgctgggcaccctgcacaacctgttctactacgaaaagctgatggccgacatccgcgcggcgatcgaggcgggaaccttcctggccttccgtgagtccttctacgcggcacgcggggcggtggccccgccgctgtaacccgaacgccccctgccaaacggcccaaggacgaacgcccggggccgtggcatacttcaaggctgacccagatccgcggtcgacacccccgtccctgaagggacgggagcgccgcccaaccaaaggaccaacgatgaacctgcttgctttcctgattcccgccgcccacgcccaggccgccggcggccaaccgcagggcatgggcctgaccacgctgctgttcccgatcatcctgatcgccatcatgtacttcctgatgatccgcccgcagatgaagcggcagaaggaacacaagtccatgctggagaagatcaagcgtggcgacgaagtgctgaccaacggtggcatcgccggcaaggtcaccgacatcggcgacaacttcatcaccatcgaagtggccgagaacgtgcgcatccgcgtgcagaagggcgctgtcggcagcgtgctgccgaccggcaccctggattcggccaagtaagccactccctttccgaagcacaaccgcggcgccggggatggcgccgcgcgggacccaagcaatgctcgaatttccacgctggaagtacgtcgtcatcctgatcgtactggcgctcagtgcgctgtacgcgctgcccaacatctaccagaaggacccggccatccagatcaccgccaaccgtggcgggcagatcgacgatgcgctgcgcgaccgtgtgctggccgacctgaagaaggccggggtcactgccatcggtgccgaaaaggaaggggaaagcctgatcgtccgtctgccggacctgaagtcgcagtctgcggccagcgatgccctgcgcgacaccgtcggcgagaagtacacggtggccctgaacctggcctcgaccgtgccggactggctggcccggctgggcggtcgcccgatggtgctcggcctggaccttcagggtggcgtgcacttcgtgctgcaggtcgaccagaaggccgccctcgacaagcgcctggatgcctacaccgaagacgtgcgcagcaccctgcgtgacgcccgcatcgcctaccagtcggtggagcgccgtgcggacaacagcatcgtggccaacctgagcccgtccgccggtgacgacgccgcgcagcgtgcccgtgccgccctggtcaaggcacagccgacgctcggctatgacgtcagcggcaaccgcatcacggtcaccgtgccggagaccgagatcacgcagatcgccaacggcgccatcgagcagaacatcaacaccctgcgcaaccgcgtgaaccagctcggcgtggccgagccgatcatccagcgccagggtgccgaccgtgtggtcgtgcagctgccgggcgtgcaggacaccgccgaagccaagcgcatgatcggcgccaccgccaccctggagtaccgcgcggtggtcgagggcaatgcgcaggacgccatcaattccggccgcatcccgccggaagcgaaggtctaccagcagcgtgatggccgcggcccgatcctgctgaacaagcgcgtgatcgtcaccggtgaccagatggtcggcgcgcaggcggtgaccgattcgaacagtggctccccggccgtcagcgtgacgctgaacaatgtcggcggccagcgcatgttcgacttcaccagcgccaacgtgaacaagccgatggcggtggtctacaccgaacgcgtgccgaccgtgaccgtcgtcgacggccaggaagtgcgtggcttcaaggtcaacgaggaagtgatctcggtggccaacatcaacggcgtgttcggcaagaacttccagaccaccggcctgcagaagaaggaagccgaggacctggccaagctgctgaagtccggctcgctggccgcgccgatggacttcgtcgaagagcgcgtggtcggcccgagcctgggcgccgagaacgtcaagaacggcatgcgcgcggtggtgttcgcgttcctgttcaccctggtgttcttcagcatctactaccgcatgttcggtgtgatcacctcggcggcgatgctgttcaacctgctgatcgtggtggcggtgatgtcgctgttcggcgccaccatgaccctgccgggcttcgccggcctggcgttgtcggtgggcctgtcggtggacgccaacgtgctgatcaacgagcgtatccgtgaagaactgcgcgccggcgtgccgggcaagaccgcgatcgtgaccggttacgagcgtgcctcgggcaccatcctcgacgccaacctgaccggcctgatcgtcggcgtggcgctgttcgcattcggtaccggtccgctgaagggcttcgcgctgaccatgatcatcggtattttcgcctccatgttcactgcgatcaccgtgtcgcgtgcgctggcgacgctgatctacggccgtcgcaagaagctccagaacgtggccatctgacgggacgacacgcacaatgaaactgtttccgctgcacatcctcccgaacgacaccaagatcgacttcatgcgctggcgccatgtcgccatggcagtcaccatcgtggtgttcctggcctcggtcgccatcatcggcatcaagggcttcaactacgcactggacttcaccggcggcaccctgatcgaaacgcgtttcgagaaggccgtggacgtcgagcaggtccgcgccaagctggagcagaacggcttcgacggtgcccaggtgcagagcgtcggtggcaataccgacctgctgatccgcctggcgccgcacggcgagcatgcgccgggcaccggtgatgccgctgccgaggacaaggccaccgccgcggccgtggtgaaggtgctgtccagcgccgacaaccaggccacggtgatgagtaccgcattcgtcggcccgcagatcggcaaggacctggcgaagaacggcctgtacgccaccattttcatgctggccggcttcctgatctacatcgcggtgcgcttcgaatggaagttcgcggtcaccgccagcatcgtggcgatgttcgacctgatcgtgacggtcgcctacgtgtccctgctgggccgtgagttcgacctgaccgtgctggccggcctgctgtcggtgatgggctttgcgatcaacgacatcatcgtggtgttcgaccgcgtccgcgagaacttccgcagcctgcgcgtggactcgatggaggtgctgaaccgttcgatcaaccagacgctgtcgcgtacggtgatcaccgcggtgatgttcttcctgtcggcgcttgccctgtacctgtacggcggtgcgtcgatggaaggcctggccgagacgcacatgatcggtgcggtgatcgtggtgctgtcctcgatcctggtcgcggtgccgatgctgacgatcggcttcctgcgcgtcagcaagcaggacctgctgccgaaggcgaaggacgtcgaggccctggcccgtcgcccgtaagcatctgctgcatgcggcacacagagaaccccgcgcaagcggggttttttgtgtgcagggcttgcagccctgcacccgcggtagtgccggccgctggccggcaacagcaacagcaacagcaacagcaacagagtgcattccgtggttgggcgggacggtgtcggagtgcggggacgccgcaagtacgtccgtgtaggctcggtcgccgcatccatgcggctgacaccccgtactccgacaccgccccgtctctgacagattcctgcggctgttggtaggtgtcgaccttggtcgacacatctgtcagatatcgataatcagactggaatcagatctaccgtgtcgaccaaggtcgacacccaccagagaagaatgctgtcccgacaggtcgcggaaatctgtcgaaggcggggtgggtccggttgcgggggcgtgagccgcatggatgcggcgaccgagcttacatggacgtacttgcagcgccccccgcaaccggatccaccccgccaacccacaggaacccagcttttgacgctgctgttgaggttgccggccagcggccggcactaccgcgtgtgcagggtgcaaccctgcaaagagaaaccccaccctacgccagcgtcggttgtgcaatcgtcccccgcgcactacgatcctgcggttcgcgcgcgcaggcgcgcgcccgtattcctgctgagcgccccgtgcgccgcatctgccaacccgaggtatccatggtcatcaaaccgcgcgtccgcggcttcatctgcgtcaccacccacccgaccggctgcgaggccgcggtcaagcagcagatcgactacatccgcgcgcgcccaccgatccagaacggtcccaagcgggtgctggtgatcggtgcgtcgaccggctacggcctggccgcgcgcatcaccgctgcctttggcagtggcgccgccaccctcggcatcttcttcgaacggccgggcagcgagaccaagccgggcacggcgggctggtacaactcggctgcgttccacaagtacgccgacgaagccggcctgtatgccaagagcatcaacggcgatgccttctccgatgaagtgaaggcgaagaccatcgaaatgatcaaggccgatctcggccaggtcgaccaggttgtctacagcctggcggcgccgcgccgcaagcatccgaagaccggcgagatcatcagctcctcgctgaagccgatcggcgagccgatcaccctgcgtggcctggataccgacaaggaagtgctgaccgagacccacctgcagccggctaccccggaagagatcgccggtaccgtcgcggtgatgggcggcgaagactggcagatgtggatcgacgcgctcgccgatgccggcgtgctggccaacggctgcaccaccaccgccttcacctacgtgggcgaagagatcacccaggcgatctactggaatggctcgatcggtgcggccaagaaggacctggacaccaaggtgctgggcctgcgcgagaagctggccaagatcggtggcgatgcacgcgtatcggtgctgaaggcggtggtgacccaggccagctcggccattccgaccatgccgctgtacctgtcgctgctgttcaaggtgatgaaggaaaagggcacccacgaaggctgcatcgaacagctggacgtgctgtatgacatcctctacggcggcaaggccgacggcgtggcgatcgatcgcctgcgccacgacctggtcgatggcgatggccgcaccgttgcgctgatcgatgaggaaggccgcctgcgcgccgattacaaggaaatggccgcagatgtgcagggcagggtggtcgcgctgtggccgcaggtgaccaacgagaacctgtacgagatcagcgatctggccggctacaaggccgacttcctgcgcctgttcggcttcggcgtggagggcgtggactacgaggccgacgtcaatccggacgtgaagatcgaaaatctggtcgacatgacctgatcaacgaaaaggccggcgaacgccggccttctcgttggtgtagagccgagccatgctcggctgctcttcgcttgagtcccgcagccgagcgtggctcggctctacagagaggcgtcacccgaactcgaagcccatctccggcagcgccgggccgacgaagtcgccctgcacgtaatccacgccggcactgaacagcagcgtcatcgagttggcatcgctgacgaactcggcaatggtgcggatacccgcttcctgtgcgcgcgcggtgatctggctgatgcggtcgatgttctcgcgcgtggcggccaggtcgctggtgaagctccggtccagcttgaggaactgcggctggaagtgggccagcagctggaatgaatccagccccgaaccgaactgctccaggccgatgcggcagcccagcggcgccacttcggctaggaactgctgcgcactgcgcaggtgggtgaaaaccttcgcttccggcgcatgcagccacagccgttcgccgggcacgccctgtgcctgcagttcgcggcgcagcgtggcgatcatctgcgggtcctcgaacgattccggcgtcaccttcaccagcacctgggtggcgttgccttcgcgtgcccgctggccgagcaccgcgatggcctgcgagaccacccagcgattgatgtcggccagcaggccgtgttcctcggcgatgcccaggaacgcggtcgggctcagcagctcgccattgttctccaggcgcaggtaggcctcgtacagctccagtggctcgccctgcaggttcagcaccggctggtagtgcagctggaagccgtcgccggacagcgcctcgcggatgcgcgcaacccagcgctgtacgcgttcttcctcgacacggtcggcggcagccgggtcgaagatgcggcaggtgttgcccagttcggcggcggcctgggtgcagtcgctggcgcgcgccagcacctggccgatgctggcgatcttctcgcccgcctgcacgccaccgatgctgaccgtcaccgtggccgagcgtgcgccgatgctgaagacatgtgcggcataggcttcgcggatgcgctcggccagcgccacggtctgcgcgtagggcccggcctgcagcacggcgaaattgtgttcgccgaagcgggccagttgcgcgtcctcgccgaccacctcggccagcagggcggcgagagcgccgataaggatgtcggccgacgccaggccgatatccggcagcaggcgcgcgtagtggtcaggctcgatcagcagcaggccgaactgaccctcgctgcgcccggcctgggccaccgcgctttccagctgcagcatgaaggtcgggcgattgagcaggccggtgacctggtcgcgctggcgcaggtcctcgacctcgcgtgccagctcggggtcgaactccatgcggcggcggagcaccacctgcaggcaggactcgccctcgtaggtggccgcggcaaattccatcgtcgccgggaaggaactgccgtcctcgtggcgcgcgtcgagctggtactgcggcggcggcgcctcgccacggctgaggcctttgagcagctgtttgaagccctccacgtgctgggcggcgaccatgtccagcagcgaaatgccttcgatgtcctcgaaatgctcgtagccgaacatctccagataggcgtcgttggcgcggatgtgcatgccttcatgcacataggcgatggggtcgcgcgaggaggcgatcagcgcgtcgcagcggcgctcggtctcgcgcatctgcgcctcgatccggcgcaggccgcgacgcgcctgcaggtcgacccactggtcacggaccacggcgagcagatgctcggggcgctggcgcagggcgagggcgcggatgccatggctgctggcctgcaccagttcgtcctcgtcgatgcgctcggccagcagcaccagcgggatgtccttgccgctggcggcgatgtgctgggccgccagctgcagcgggatgccctgcgaaggcgaggccagcaccaggtcgatggcctggctggccagcacctgggccagctcggccgcatcctgcgggcgccacgggcgtaccgcgatgccgctgttgcgcagggtgctgacgatggcttcggcattctcgccgctgtcatcgacgatcagcaggcggatggtgatgtcgttcgcgttctgcatgcactgctccccaatctgcgaatctagatacacgatgcgcggcgaaccgtccatgcgcgcacccctggcgcgcgtcgaacggcgaagtggttcacaccacgccgcccgctgcgtggccgctggcccaggcccattggaagttgtagccgcccagccagccggtcacgtccagcacctcgccaacgaagtgcaggccgggcacgcgcttggattccatcgtcgaggatgacacttcggcggtgtccacgccgcccagggtgacctcggcggtgcggtagccttcggtgccgctggccaccagcgggaatgcgcccagcagctgcgcagcctggcgcagcaccggctcgtccagctggcgcacgggccgatcgggcagccagtgctcgcacaggcgttgcgccagccgcttcggcagtacctcgcccagcaccgtgcgcagctcggcggccgggcggtcgcgcttcatctggcgcaaccactcgccggcatcctggcccggcaacaggtccagctccagcacatcgccaggctgccagaacgacgaaatctgcaggatggccgggccgcttacgccacggtgggtcagcagcatgaagttctggaaactctttccgttgcagcgcgcctcgatcggcagtgcgacgccgctgaggtcggccagccgctcctggtgcttgccgctgagggtcagcggcaccagccccgcgcgggtcggcagtacctggtggccgaactggcgggccacctcatagccaaaaccgctggcccccatgctgggaatcgacaggccaccggtggcaaccaccagcgaggcgcaatggaacaggccctgggtggtgtgcacgcggaaaccatcgctgccgtgctcgatgcgctgcacgctgcagtcggtacggatctgtacgccggccgcctggcactcgtccaccagcatcttcacgatctgcttggacgagatatcgcagaacagctgccccagttccttttcgtgataggcgatgccgtgcttgtgcaccagctcgatgaaatgccagggcgtgtagcgggccagcgccgacttgcagaagtgcgggttggccgacaggaagttggccggggtggtgccggtgttggtgaagttgcagcggccaccgccggacatcaggatcttcttgccgaccttgttggcatggtcgatcacctgcacctggcggccgcgctggccggcagtgatcgcggtcatcagcccggctgcgccggcaccgatgaccaccacatcgcaacggatggtgctcatgccttggcgcgcttgcgccagtccgggatcacgtcgagctggatctggtcgttgagcagctgcacttcgccgtcctggatcagcacgctccaacgcatggcacgctggatctgctggccccagcgctcgacgaattcgccgtccagagcgaccaccgaaagattgtcgaagcgcgccaggcccttgccctgcttgctccaccagatctccgaggcgttgccgccgtagttgaccacctgcacctggcggctgcgattgctggccttgcggatgcgcgattcgtccggatggcccaggtcgatccactgcaggatgtcgccggtgtagtcgtgttcccacagatcgggctcgtcatcggtactcaggccgcggccgaactccaggcgatcgccggcgttcagcgcgaaggcgagcaggcgcaccatcaggcgctcgtcggtctcggacggatgctgggccagggtcaggttgtgggtcgcgtagtagccgcgatccatgtcgctgatctgcagttcggccttgcggatggtggcggtaagagccatgggggatccgtggactaaagaggacaatgatagaggtttgctccgggggtgtccgtggccggactgtctgcgcaccgtcaacggtggcactctttcgctctttcccttggccggagtggacgccatgagcttgcccagccggttgcagctgccgcccggcccctgggccaccctgctggatggcctgtgtgcacgttttccgcgcatcgcgcgcgcgcaatggcaggatcgcttcgcgcgcggccgcgtgctggacgcacagggcagggcgctcactgcggacatgccctggcaggtcgggctggacatccagtacttccgcgaggtggccgacgaaccggtgatccccttcaccgaaaccatcgtccatctggatgcgcacctgctggtggccgacaagccgcatttcctgccggtgacaccggcgggcgggcatgtacgcgagacgctgctggcgcggctggtcgcccgcaccggcaatgccgatctggtgccgctgcaccggctggatcggctgacggccgggttggtgctgttctcgacccagcgtgcgtcgcgcgatgcttaccagcgcctgttccgtgagcggcgcatcgaaaagacctatgaggccttggcaccggcgctgccggggcgggagtttccgctgcagcggtacagccgcctggtgccgggcgagccgttcttccgcatggccgaagtgcccggcgaggccaatgcgcgcagccggatcgagctgatcgaggccgaagggccgatctggcgctaccggctgctgccggaaaccggccgcaagcatcagctgcgcgtgcacatggccatgctgggggcgccgatcatgggtgacgacctgtacccgcagcttcggcaacgggcaccggacgtagccgaggcgccgctgcagctgctggctcgggccctggctttcgatgacccgttgagtggtgcacgacggatgttcagcagcggccgcagcctgagccttccggcttagggcggccaggcgctcagcgggccgggcgtcgcgccagccagcggtccagctcggcggcgaacagctgccggtcgcgggggcccaggggtggcggtccgccggtctggaccccggcgccgcgcagttcctccatgaaattgcgcatcgacagtcgctcggccatgttgttcggtgtgtacaactggccgcgcgggttcagcgcgacggcctgcttctccagcaccagcgcggccagcgggatgtcctgggtgaccaccaggtcccccgcggcgacccgctcgacgatggcgctgtcggccacgtccagcccctgcggcacctggatcgagcgcagccagcgcgagggcggggtgcggatccactggttggcgaccaaggtcagttcgatcccgacccgttcagccgcacggaacaggatgtcgcggatgacggtgggacaggcgtccgcatccacccagatgcggggagaggcgtgttcagcgggggtttcagcttcagtcatttacccagtgtagggtaggaaaaacctgaatggggactcggagttagccgcgagaggctgccaacccttgtcacgcctagcgggtgacgtattcccatgaacgtcggggctatcgctttttgcagaaaacacgcgtatcgtgcgacccactgtgtttgctagggtcaccgtgaatcgtggcctggtgcagttgatctcacgatccgctcatcgatccgctttaccaacgcctgcaactcagtctcggccccgatacccggtggctgcgatttttttcaacatgtgtttcaggagttagtaaaaatgtctgaacgtcagaccggtaccgtcaagtggttcaacgacgccaagggcttcggcttcatcaccccggaaagcggcccggacctgttcgtgcacttccgcgcgatccagggcaccggcttcaagaccctgcaggaaggccagaaggttaccttcatcgccgtccagggtcagaagggcatgcaggctgaccaggtgcaggcggtctaatccgtctgctaccgttgggtagccagaacgccggaagcgaaagcttccggcgttttttattgcccgccgtttttttgtagagtcgagccatgctggactgcgcccaaagacagtcgagcatggctcaactctacaaaggacatgcagccggcgcggtacgatgcgcgtctccccaagggatcacccccatgcgcatcgtccaccatctggaaaactcccgttcgctgcgcgtgctgtggatgctggaggagctggggttggactacgaactgcgccgctatccgcgcgatccgaagacgctgctggcgccgccggaactgcgcaacgtgcatccgctcggcaagtcgccggtactgcaggatggtgagctggtactggccgagtccggcgcgatcctcgactacctcgctgaccgttacgacacgcaacgccagctgtcgccgtcaccaatgccggccgacggggccgaacgcatcgcttaccgctactggctgcactacgccgaaggctcggcgatgccaccgttgctgctgaccctggtgatgggccgcatacgcaacgcgccaatgccgttcttcgcgcgcccgatcgcacgcagcattgccgacaaggccgagcgcggcttcatcggcccgcagcggcgcctgcacctggactggatggagcgccgcctggccgaaagcccgtggtttgccggcgagcgtttcagtgcggccgacatccagatgagcttcccgatccaggccgctgccgcgcgcggtggtggcctggacgacaaaccggcactgcgtggcttcctcaagcgtatcggtgaacgcccggcctaccagcgtgccgaggcccacggcggccacctgcaggcgctcggcggcaattgaggagggcggccgtcgccctcatctccagcaccatggataccgacactccccgtttcgacaaccgcctgctgcacaccctgccgggcgaccccgaatccggcccgcgcaggcgcgaagtgctgggcgccgcctggtcgcccgtgatgccgaccccggtgacggcgcccacgctgttggcctgggcgccggacgtcgccgaaatgcttggcttcgataccgctgaagtcgaaagcgaaggtttcgcgcaggtattcggcggcaatgcgctgtacgccggcatgcaaccgtgggcagccaactacggtggccatcagtttggccactgggccggccagctcggcgacgggcgtgcgatttcgctgggtgagctggttgcgccggatggccagcactgggagctgcagttgaagggggccgggccaacgccgtactcgcggggggccgatggacgggcagtgctgcgctcatcgatccgcgaattcctgtgcagcgaggcgatgcatcaccttggcgtgccgactacgcgcgcgttgtcactggtcggcaccggtgaggacgtggtgcgcgacatgttctatgacggccatccgcgtgccgagccaggcgccatcgtatgccgggtctcgccgtcgttcctgcgcttcggttcgttcgaactgccggcctcgcgcggtgaaaccgccctgctgcagcagctggtggatgcctgcatcgcccgcgacttccccgcactgcaagggcagggcgaggcgctgtacggcgactggttcgcgcagatcgccgtgcgcaccgccgagatgatcgcgcactggatgcgtgtcggcttcgtgcacggcgtgatgaacaccgacaacctgtccgtgctcggtgtgacgctggattacggcccctatggctgggtcgaggacttcgatccggactggacgccgaacaccaccgacgcccagggacgccgctaccgcttcggcacccagccgcaggtggcgtactggaacctgagccgattggcgcaggcgctgtcgccgctgttcgccgatgtcgcaccgctgcaggcaggcctggcggcttaccagtccacgttcgtggcctgcacgcgtcgcgatgctgcagcgaagctggggctggctgctgccgacgatgatgacctgcagctctaccagcgctggcaacagctgatgcaggagggcgcaatggacatgaccctggcttggcgcgcactgatgcgcatcgacccggcggcagcagatgcgacggttctggacgcggtgtactacgacgaggcgcggcgacaggcagtgcaggcaccgctgcggcactggctgcaggactacgcagcgcgcctgcgccgcgatccgctggcggccagcgaacgccaggcgaagatggcagcggccaacccgctgtacgtgctgcgcaactggctggcccaggaagcgatcgaccgcgcagagcagggggatctcggcggcgtccatgcactgcaggacgtgctgcgcgacccgtacaccgagcgtgccggcctggaacacttcgctggcaagcgcccggcgtgggccgacaatcgcgccggttgctcgatgctgtcctgcagttcctgagggtgggtttcggcagggctgagccctgcacctgcagaggccagatcaacagccagagcaaaagcggattccgtggtttggcggggcggtgtcggagtgcggggacgctgcaagtacgtccctgtaagcttggcagccgcatccatgcggctgacaccccgcactccgacaccgccccacctccgacagattcccgcggctgtgggtaggtgtcgaccttggtcgacacatctgtcagatatcgaatgaaattccggggtcagatccgttttccttcgtaaaacggatctgaccccatgagcaattccgacaggtcgcaggaaactgtcgaaggcggggtgggtccggtggcgggggcgtgaacgccatggatggcgcgaccgagcctacgcggacgtatctacggcgtcccccgcaaccgggcccgccccgccatcccccgggatgcaggctgttgccgttgctgttgaggttgccggccagcggccggcactaccgcaggtgccgggcgcagcccggccggacaccaccagcaggcaggcggcgcccggaacaggtaccctatgccgccatcagatagccaatgtgacatgaccgacgccatcgtcgctccgcagtgggcctcccgcctgcgcgacatcgccgacttccccaagcccggcatcctgttcaaggacatcatgccgctgctcgcccatggcgaggatttccgcggcgcgatcaccgcgatggccgaccgttggcgcgaccagaagctggacgcagtggtcggcatcgaatcgcgtgggttcatcctcggtgccgcgatggcgctggagctgggcgtcggcttcgtgccggtgcgcaagccgggcaagctgccgggccaggtcctgcgcgaggaatacacgctggaataccgcagcgactgcatcgaagtgcatgccgatgcgctgccggccggcgcccgcgtggtgatcatcgacgacgtgctggccaccggcggcacgctggtcgctgcgctgtcgctggtgcgccgcctgggcgttgaagtggtcggcgccggtgtactggtcgagctggacggcctcggtggccgtgcgcgctgggaaacggacctgccgctgcacaccgaactggtgttctgatcgaagggcaggtgccaaccagggttggcatctaccagagcgaatggccgggagccggtcgttgccaaccttggttggcagcacttttcgcgacgggtgccatggacgggccaaccaaggttggccgctaccaggccagatcgttacccaccgtggttggcaacgctgcttcaatcacatcatccgcacgcggaaacgacggcccttgatcttgccggcttccagcttggccacggccttgttggcctgctcacgcgcgatcgccacataggagcgggtcgggaagatcgcgatcttgccgatgaacttgctcgacaggccggcatcaccggtcagcgcaccgagaatgtcgcccgggcgcagcttgtcggtcttgccaccgtcgatgcgcagcgtgcgcatcgcggcctgcggcagttcggccgggcgcgaggttgccagcggcgtcttctgccagtccagcggctgccccatctgcgcttcgatggcgtcggcgcgggtcttctcgcggccggccaccaggctgatcgccaggccgctggcaccggcgcgcccggtacggcccacgcggtgctggtagctctccacgtcggtcggcagttcgtagttgatcaccgccgccagctcttccacgtccaggccgcgcgcggcgacgtcgctggcgaccagcacgttgcagctgcggttggccagcagcaacagcacttcctcgcggtcgcgctgttccatgtcgccatgcagggccagtgcggagaagccgaactgctgcagcgagttggccacttcgtcaacatccttgcgggtgttgcagaacacgaccgccgattccggcgtgtacttcagcagcaggccggccagcgccttctggcgatgcgccggttccacctcgcagaacaggtggcggatggccggtgcctggtcggcgccttccacggtcacttccaccgcgtcgcgcagcaggtcacgcgccatggcgcggatgctgtcggggaaggtggcggagaacagcaggctctggcggtccctatgggtgcggccggcgatctcgcggatcggctcctcgaagcccatgtcgagcatgcggtcggcctcgtccagcaccagcgtgcgcaccgcgcccaggttcagcgcgcgcttgcgtgccagctcctgcacgcggccgggcgtgccgaccaccacatgcggatcgtggccttcaagcgaggccagctgcgggcccagcggcacgccgcccaccagcagcaacagcttcaggttggggatgccggtggccagcttgcggatctgcttgccgacctggtcggccagttcgcgggtcgggcacagcaccagcgcctgcacgcggatcaggctggggtcgatggcctgcagcaggcccaggccgaaggcggcggtcttgccgctgccggtgggtgcctgtgcgatcacatcacggccatcgaggatggccggcaggctctgcgcctgcacgggggtgagggtggtgtagccgagggcatccaggccgggctgcagggccgggctcagcggcagggtcgagaagtcagtcatggcgcattgtacctgcctgcgcggccggtcccgcctgatcggatggggtcgaatccctttccgcaggaaagggctccgaccccatcggagtcgtcatccacgcagggcgtgaatacacccggggggcatccacgcatggcgtggatctacgggtgggtgccgacctgggtcggcacgctcctgctcagccaagcaccgccagtacaccctgatggatcgccaggccaccgaacagcagccaggcgaacaggatcagcgccagcagcagcggcttcagcccggcctggcgcagcgccgagacgtgggtggtcaggcccagcgcggccatcgccatcgccagcagcacggtatccagctgcaccagccccgcctgcaggcccgccggcagcagatgcagcgagttgaacccggccaccgccacgaaaccaaaagcgaaccacggcaccacgatgcgcgccttgctgccgtcggcgctggccttgccgccacgcgccagccacagcgacagcgcgaccaggaacggcgccagcagcatcacccgcaccatcttggtgatcaccgccgtgtcggccgctgcttcgttgaccgcgcggcctgccgccaccacctgtgccacttcatgcaccgtcgcaccggtgaacaggccgtactgccgcgcgtccattgccagccagccgtgcgactgcaccagtgcatacaacgccgggtaaaggaacatcgccagcgtgccgaacaccaccaccgtagagaccgcgacggtgacctgcgcagcgcggccgcgcaccaccggctcggcggccatcaccgccgccgcgccgcagatcgcgctgccggcgccgatcagcatcgccgcttcgcgctccatcttgaacacgcgcatgcccagccagcaggccagcccgaaggtgctggcgaccaccagcacgtccatcagcacgccggccacgccgacgtggccgatgtcctggaaggtcaggcgcaggccgtacagcacgatgccggcgcgcagcagccagtgcttggagaagccgacaccggccgcgctgctcggcgccagccgcgggtaaagggtgttgccgacgacgatgccggcgacgatggccacggtcagcgcgctcaggccatgcgcctggagccagggaagctgggccaggtacagcgacgccgccgcgatcaggcccaccagcagcaggccgggcaggcgcggctgccagcgttggcgcagggcgggcagggaccaggaggagcgagcggtggcgttcatggcgtgacaggactggggtgatgggccaagcgtgcgcctgtgtcactgacctgtaaaacgaataatatgggtgaaacctacctataaagcgggtacattccatgcgcctgaccttgcgccagctgcaggtcttcgtcgccatcgccgaccatggcaccacgactgccgccggccaggccgtcgcgctctcgcagtcggccagcagcgccgccctgcaggagctggaggcgcacttcggcaccccgctgttcgaccgcatcggccgccgcctggcgctgaacgggcacggccgcgcactgctggagccggcgcgcacgttgctggtcaacgccgccgatctggagcggcagctggccgccggcggcgacccgtcgcagggcgcaccgctacggctggtgctggccgccagtaccaccatcggcaactacctgctgccgccacgcatcgccgaactgctgcggcaggcgccgcaggccgaggtcgatctgcgcatcgacaacagtgccggcgtggtcgccgcggtacagcgcctggacgtcgacgccggcctgatcgaaggcccgtgccatgagcgtggcctgcaggtgaccgcctggcagcaggacccactggtgatcgtggctgccgccgatgcccgcgcacgctggtcgctggatgaactgcgccgagcacgctggctgctgcgtgagcctggctccggcacccgcgaagccgtggaacaggccctgctgccgcacctgcgtggcttcgcgcagaccctgcagctgggcaataccgaagcgatcaagcaggccgccatcgccggcctcggcctggcctgcctgtcgcgccacgcgctggaagagccgctggccctgggccgcctgcgcgtgctcgagactccgctgccggccctgcagcgcaccctgtggctggtgcgccaccccggcaagcaatggctgccggggttgcaggcgttgctgggggaggtggggtagccatcagatttccagtcgattccatccatcgacccttcttgtagcgctcatccacgcatggcgtggatctaccgtgtcgaccaaggtcgacacccaccagagcagaatgtagttccgacagattgcaggaatctatcgaaggcgggatgggtccggttgcgggggtgtccgcggcatggatgccgcggccaagcccccagggacgggtttacggcgtcccccgcgaccggacccatcccgccatcccacaggaaaccagcttttgacgttgccgttgaggttgccggccagcggccggcactaccgcgggtgccgggtgcaacccggccgacgcccccaacccgtacaatatccggatgcctctgattactctgcagaacgtcgacttcagcgtcggcggcccgttgttgctggaaaaggccgaactgtcgatcgagccgggcgaacgcatcgccctgatcggccgcaacggcgccggcaaatccaccctgctcaagctgctgtccggcgaccacaagcccgatgacggcgaagtccgcgtgcagcagggcgtgcgcgtcacccgcctggagcaggaagtgccacacggcgcagccggctcggtgttcgacgtcgttgccgatggcctcggtgaactgggccagtggctggccgagttccaccatctcagccatgccgaggtcttcgatggtgaagccctcggcaatgtgcaggccaagatcgatgccgccaacggctggggcctggaccagcgtgtcagcgaaacgctgaccaagctcgacctggacggcgatgccgaattcggccgcctgtccggcggcatgaagcgccgcgtgctgctggcccgtgcactggtctccagcccggacgtgctgctgctggacgaaccgaccaaccacctggacatcgaagccatcgactggctcgaagcgttcctgaagggctggagcggcagcgtggtgttcgtcacccatgaccgccgcttcctgcgtgcgctggccacccgcatcgtcgagatcgaccgcggccaggtgaccagctggccgggcgactgggccaactacgagcgccgccgcgaggaacgcctcaacgcgcaggcgcaggaaaatgcccgcttcgacaagctgctggcgcaggaagaagtctggatccgccaaggcatcaaggcgcgccgtacccgcgacgaaggccgcgtgcgccgcctcaaggcgatgcgcaccgaacgctcgcagcgccgcgacctcagcggtaacgtcaagatggaagccgcgcagggcgtcagctccggcaagaaggtcatcgacgtcaaggacatttcgttcgccttcggcgagcgcaccatggtccgcgatttcaccaccaccatcctgcgtggcgaccgcatcggcctgatcggccccaacggcagcggcaagaccacgctgctgaagctgctgctgggtgaactgcagccggccaagggtgaggtcaatgcgggcaccaacctgcagatcgcctatttcgaccagtaccgcgcggtgctgcgcgaagactggagcgcgatcgagaacgtggccgaaggccgcgatttcctcgagttcaacggcaagcgcaagcacgtgcatgcctacctgcaggacttcatgttcacccccgagcgcgcgcgtgcgccgatcacccgcctgtccggtggcgagcgcaaccgcctgctgctggccaagctgttcgcgcagccgtccaacctgctggtgatggacgaaccgaccaacgacctcgacgtggaaaccctggagctgctggaagagctgctgggcgagtacaccggtactctgctgctggtcagccacgaccgtgacttcatcgacaacgtggtgacctccacgctggtgatggaaggcgacggcgtgatcggcgagtacgtcggtggctacagcgactggcagcgctatgcggccagcgtggctgcgcctgccgcggccccggctgccaagccggcgactgctgcaccggccgctgctgcggccgcgactcccgcagcccccaagcgcaagctggcgtacaaggaagcgcgcgagctggagcagctgccaaagaccatcgagaagctggaaggcgatgtcgaagggctgacctcggcgatgaacgacccatcgttctacacccgcagcagtgctgaagtgacggcgcacacccagcagctggccaaggtgcaggccgaactggatgccgcttacgcgcgctgggaagagctggaaggctgagcgttgaccggcgccagcgatcgcgccgattgatgtagagccgagcccacgctcggctcagcagatccacgccatgcgtggatatccggaatctgtgcggaccaacggtccgcacccaccaaccgacggtccgcaccgaccgggggggccggccgtcatttgaccccgtgcagatcccgcagctggctcggccggctgccgaagtacgccgccagatcggcgatgtcctgatcactcaggtccttcgcctgcggcgtcatcagcgcatgctggcggtcaccggcgcggtaggcctgcagcgcgtgcgccaggtagtcaccgtactgcccacccagcttcggataggtcggatcgatcggcgcattgccgtcggccccatggcagtcgatgcagctctggttggtggctttgcccttcaccttggcgcgggcttcaccggcggcctcgcgacctgccggcaggccggcggaggacgatgaaccgtgctcgccgctggcatggcccgggtcggcggccgatttttcgctgttttccacctgcgactgtgagcaggcggccagcagcagggcaacggacagggcgatggcgtgacgcatcggatgcgcggctttcgacatgggcgggccttacttgacggtggacaggtaaacagagagatcggcgatctcctgttcgctgaaactcatcgactgcgcctgcatcgtcggatgccggcgcttgccctggcggtactcggtcagggcctgggccagatactgctgggtctggccgccgatcttcggcacccggtaactggggtaggcgttcttgtagccggtgatcccgtggcagccctggcaggtgtaggccaggacgcggccattgtcgaagttgccggtgggtgcggcgggcgctggcgcaacggccggagccggggccggggcgggtgtggcaggagcaggagcgggctgtgcggcggccccaaggggcaggaggacggccagagcgagacaagcggcgagcggctgcgggcgcatggtgtcgtttccggggattcgggtctggtcgttccggcgtggggtacggaacgacccgagtatagcctcaggtttcatctagctgaaatgggggcgcgccgaccagcggcgtgaaggcaccatgacctttgggatatggtgttgccgtgaagtggtgcattactttgctaccacacctgtccacgcatccttcagggacccgacgatgtcgcacccaaccttcctgtccggccgtcgcagcggaatctgcgctgccgcactgctgatctccacctccctgctgctgggcggttgcgccgcagggcccaattccgaagccaaggctgccgagaccaaggaggagaagaaggtcgacgcagtcccggtcgaagtggcggtggccagccatcgtgccgtcgcggccagctacaccggcacggccgcgctggaaccacgcgccgagtcgcaggtggtcgccaagacctccggcgtggcgctggcggtgctggtcgaggaagggcagcgggtcaccgccggccaaccgctggtgcggctggacccggatcgtgcacggctggccgttgcacagagcgaagcgcagatgcgcaagctggaaaacaattaccagcgcgcacagaagctggtcggccagcagatggtcagcgccgccgatgtcgaccagctgcgctacgacctggaaaacgtccgtgcgcagtaccggctggccacgctggagctgtcctacaccacggtggtggcaccgatttccggcgtgatcgcatcgcgctcgatcaagaccggcaacttcgtgcagatcaacacgccgatcttccgcatcgtcgacaactcgcggctggaagccaccctcaacgtgcccgagcgtgaactggccaccctgcgcgccggccagccggtgacgctggcggccgacgcgttgccggggcagagcttcaccggcaccgttgatcgcatcgcgccggtggtggattcgggcagcggcacgtttcgcgtggtcagcgccttcgacggcgccgcacacgcgctgcagcccggcatgttcggtcgcatccgcatcgactacgaccagcgtgccgatgcgctggtcgtaccgcgcctggcgttgctcgacgacggtgagccggcggtgttccgcgtgcgcgaaggcaaggtcgcacgcgttccggtcaagctgggttacgccgagggcccgtgggtggagatccgtgatggcctggcggccggtgatcaggtggtcaccgccggcaaggtcgccctgcgcgacggcaccacggtgcaggtgattgccgatccgaaggcgaagacggtcgctgcggccgccaagcccgcagacaaggccgggagcaagcaatgaccgccccgggccacgaccacggtgcctcgccggcgagcgacggcgccgccgccggcatgcgcggcggcctggtggagtttgccacccgccgccgcgtgaccatcgccatgtgcacggtcacgctgctgctgttcggcctgatcgcgctgggcaatctcaaggtcaacctgctgcccgacctgagctacccgacgctgaccgtgcgcaccgaatacaccggtgcagcgccgactgaaatcgaaaccctgatcacccagccggtcgaagaagcggtcggcgtggtcaagaacctgcgcaagctgaagtcggtctcgcgcaccggccagagcgacgtggtgctggaattcgcctggggcaccaacatggaccaggccagcctggaggtgcgcgacaagatggaagcgctgaacctgccgctggaggccaaggccccggtgctgctgcgcttcaatccgtcaaccgagccgatcatgcgcctggtgctgtcgaacaagacggcgccgaccagcgatgccgatgcggtgcgcgagctgaccggcctgcgccgctatgccgatgaagacctcaagaagaagctggagccggtcaccggtgtggcggcagtgaaggtgggcggcggcctggaggacgagatccaggtcgacatcgaccagcagaagcttgcccagctgaacctgccgatcgacaccgtcatcaagcgcctgaaggacgagaacatcaacatttccggcggccgcctggaggagggctcgcagcgcttcctggtgcgtaccgtcaaccagttcgccgacctggaggagatccgcaacctgctggtgaccacccaggccgccaatggcagcgccgcggactcggcgctgcagcagatgttcaacatcgccgcgtcgaccggttcggcggccgccatcgcggcggcgtcggcggcacagagcgcgtcgtccggtggtggctccagcgtggttgccaacggcgtgccggtgcgcctgaaggacgtggccaccgtgcgccagggctacaaggagcgcgaagcgatcatccgcctgggcggcaaggaatcggtcgagctggccatctacaaggaaggcgacgccaacaccgtgtccaccgctgatgcgctgcgcaagcgcctggagcagatcaagggcacgttcccgtccgatgtcgagctgaccaccatcgaggaccagtcgcgcttcatcgagcacgccatcgccgacgtcaagaaggatgccgtgatcggcggcctgctggcgatcctgatcatcttcctgttcctgcgcgatggctggagtacgttcgtgatcagcctgtcgttgccggtctcgatcatcgccacgttcttcttcatgggccagctcggcctgagcttgaacgtgatgtcgctgggtggcctggcattggccaccggcctggtggtggatgactcgatcgtggtgctggagagcatcgccaaggcccgtgagcgtggcctgggcatcctgcaggcggcgatcgccggcacccgtgaagtgagcatggccgtggtcgcctcgaccctgaccaccatcgcggtgttcctgccgctggtgttcgtcgatggcatcgccgggcagctgttccgcgaccaggcgctgaccgtggcgatcgccatcgcgatctcgctgctggtgtcgatgaccctgatcccgatgctgagctcgctgaaggggcggccgccgctggcgttcccggaagaggcgccgaacgcagcatggcagccgcagaagcgttggcagaagccggttgcactgggccgccgtggcgtgctcgccagcgtgcgctggagcttctatgcgctggcctggctcgtggtgcgcctgtggcgcggcgtggtggcggtggtcggcccggtgatgcgcaaggccagcgacctggcgatgaagccctatgcaggcgccgagcgaggctacctgcgcctgctgccgagtgcgctggcgcatcccggcaaggtgctgggcgtggcagccatcattttcgtggcgaccatggcgctggtgccgatgcttggcgccgacctgatcccgcagctggcgcaggaccgtttcgaaatgacggtgaagctgccggccggcacgccgctcaagcagaccgatgcgctggtgcgcgagctgcagctggcgcatggcaagggcgaaggcgtggcctcgctgtatggcgtcagtggcagcggcacccggctggatgccagcccgaccgaaagtggcgagaacatcggcaagctgaccgtggtgatggaaggtggcggcaatgcgcacactgaagcggcgatcaccgagcgcctgcgcggcaccatgagccagcacccgggtgcccaggtcgacttcgcgcggccggcgttgttcagcttttccacgccgctggaaatcgaactgcgcgggcaggacatggcgaccctggaagtggccggccagcgcctggcggcgatgctgcgcggcaacgcccactacgccgacgtgaagtcgacggtggaagagggcttcccggaaatccagatccgcttcgaccaggagcgcgccggtgcactgggcctgaccacccgccagatcgccgacgtggtggtgaagaaggtgcgtggcgacgtcgccacccgctacagcttccgtgaccgcaagatcgacgtgctggtgcgcgcccaggaaggtgaccgcgccagcgtggagagcatccgccggctgatcgtcaatccgggcagcacccgcccggtgaccctggacgcggtggccgacgtggtcgccaccaccggccccagcgagatccatcgtgccgaccagacccgggtggcggtggtgtcggccaacctgcgcgacatcgacctgggcgccgccatgcgcgaagtgcagcagatggtggccgaacagccgctgggcgcaggcgtgggcctgcacatcggtggccagggcgaggagctggcgcaggcggcgaagtcgctgatcttcgccttcggcctggcgatcttcctggtctacctggtgatggcctcgcagttcgaatccctgctgcacccgttcgtgatcctgttcaccatcccgctggcgctggtcggcgcgatcctggcgctgatgctgaccggaaagcccatctcggtggtggtgttcatcggcctgatcctgctggtcggcctggtcaccaagaacgcgatcatcctgatcgacaaggtcaaccagctgcgcgaggccggcgtggccaagcatgaggcgctggtggaaggtgcgcgctcgcgcctgcggccgatcatcatgaccacgctgtgcacgctgttcggcttcctgccgctggcggtggcgatgggcgagggcgccgaagtgcgtgcaccgatggcgatcaccgtgatcggtggcctgctggtgtcgacgctgctgacgctgctggtgatcccggtggtgtacgacctgatggatcgtcgcggcgacgcctactaccgtgagcgcggccgcaagcacgccggtgagggcctgcatggcgacgagggcggcacagcgggtgtggaggaaccggcatgagtgttgccgagttctccatccgccgtccggtcaccaccatcatgtgcttcgtgtcgctggtggtgatcggcctgatcgcttcgttccggctgccgctggaggcgttgccggacatctccgcgccgttcctgttcgtgcagattccctacaccggctcgaccccggaagaagtggaacggaccatcatccgtccggtcgaggaatcgctggcgacgatgaccggcatcaagcgcatgcgctcgtcggccacctccgaggcggcgctgatctacatcgagttcagcgactgggaccgcgacatcgccattgccgcgtcggacgcgcgcgagcgtatcgacgcgatccgcagcgacctgcccgacgacctgcagcgctacaacgtgttcaagtggtccagcagcgaccagcccgtgctgaaggtgcggctggccagcaccaccgacctgaccaccgcctatgacatgctcgatcgtgagttcaagcggcgcatcgagcgtattcccggtgtggcccgcgtcgatatcaccggtgcgccgccgaacgaggtggagatcgccatcgatccgaaccggctcaacgcgcatgggttgagcatcaacgagctgagcgagcgcctgcgcacgctgaacttctcaatctcggccgggcagatcgatgacaacggccaacgcgtgcgcgtgcagccggtaggcgagatcaccgaccttcaggagatgcgcgacctggtgatcaacgccaagggcctgcgcctgggcgacatcgccgacgtgcgcctgaagccggcgcggatgaactacgggcgccgcctggacggcaacccggcggtgggcctggacatcttcaaggaacgcagcgccaacctggtggacgtttcgcgtgcggcactggccgaggtcgaggcgatccgcgcgcagccgtcgatgcgcgacgtgcagatcaaggtgatcgacaaccagggcaaggcagtgacgtcctcgctgctggagctggccgaggccggcgcggtcggcctgatcctgtcggtcaccgtgctgttcttcttcctgcgccattggccgtcgacgctgatggtgaccctggccattccgatctgcttcaccatcaccctcggcttcatgtacttcgtcggggtgacactcaacatcctgaccatgatgggcctgctgctggccgtcggcatgctggtcgacaacgcggtggtggtggtggagagcatctaccaggagcgcgagcgcatgccggggcagccacggctggcctcgatcatcggcacccgcaacgtggccatcgcgctcagcgccggcacgctgtgccactgcatcgtgttcgtgccgaacctgttcggcgagaccaacaacatcagcatcttcatggcgcagatcgcgatcaccatctcggtctcgctgctggcctcgtggctggtggcggtcagcctgatcccgatgctgtccgcgcgcatggccacgcccaagctggtgcactcgcagaccggcctgatcgcgcgcctgcagcgacgctatgcgcagctgctggactggtcactgcatcaccgcggttggagcctgctcggcatcctgctcgtggtgctggtcagcctggtgccgatgaagctgaccaaggtcgacatgttcggtggtgaggggggcaaggacatcttcatcggctacatgtggaagggcgcctacacctaccgccagatgtccgaggaagtggcgcgggtggagaactggatcgaccagaaccgcgaacgcctgcacgtgaagcaggtgtattcctggtacagcgagcaggaaggcagctccacggtggtcaccctggacgaaaaatacgccaaggacatcaagtcgctgcaggaggaactgcgcaagggcctgccgaagtcggcacgcaccgattacttcgtcggcaaccagggcggcgatggcggtggcggcagcaaccagggcgtgcaggtgcagctggtgggtgattccagctcgatgctgcaggagatcggccaggaagtggtgccgttgctggcgcagcgtgccgagctgcgtgacgtgcgcatcgacaacggcgagaagggcggcgagctgaaggtgcgcgtcgaccgcgagcgtgccgcagcgttcggcttcaatgccgagcaggtggccagcttcgtcggtctggcgctgcgcggcgcgccgatgcgcgagttccgacgcggtgacaacgaagtgccggtgtgggtgcgctttgccggcgccgagcagagcagcccggaagacctggccggtttcagcgtgcgcaccggcgatggccgcagcgtgccgctgctgagcctggtcaccgtggacgttggttcgtcggccacccagatcggccgcaccaaccgccagaccacgttgaccatcaaggccaacctggccgagaaggtcaccgcgccggacgggcgcaaggcgatcgaagccgtgctcaagccgatgaacttcccggccggctatggcttcactttcgacggcggcgactacggcaacgacgacgaggccatgcagcagatggtgttcaacctgctgatcgcactggtgatgatctacgtggtgatggcggcggtgttcgagtcgctgctgttcccggcggcgatcatgagcggcgtgctgttctcgatcttcggcgtgttctggctgttctggatcaccggcacctcgttcgggatcatgtccttcatcggcatcctggtgctgatgggcgtggtggtgaacaacggcatcgtgatgatcgagcacatcaacaacctgcggcgcagcggcatgggccgcacccaggcgctggtggaaggctcacgcgaacgcctgcgcccgatcatgatgaccatgggcacggcgatcctggcgatgatcccgatctcgctgaccgatacgcagatgttcggcaatggcccggagtattcgccgatggcgcgcgcgattgcgggcggcctggcgttctcgacggtggtcagcctgctgttcctgccgacgatctatgcggtgctcgatgacctgcgcaatgccgtgacgcggttgatccgccgtgcacgcgggctggagaggatggagccgggcgctgcccggctgtaatgcgcgccaacgtgttgtggtgtgggggaggccggtcgtagtggggcggtctccccctttttttctgctcgccgcgtcgcggcgtcgcccgagcatgggctcgggcgctacagattctgtggccggttgagaggcttaccccgccaccttgccccacaccttgaaggtggtcagccacaggccgagcatgctgccgatgttggtcagcatgaaggtcagcaccacgcgggtaacgcgattgcggtaccagcccttcaggctctgcgcatcgtcgcgcagcttcaggaagtcttcgtaggccggcttgcgcaggcgcgcttccaccagcgccgagaatgcgccggtcgggatgctcaggcggaacggcttgaacggggccaccgcgatcgcggtgagaatgctcagcgggtgaccgcctgccagcaggcagcccaggcccgccaggccgccggtatacattgcccaggtcgccagcagctcggtgcccacgcccaggccgccgcggtagaagcccacaccgatgccggtcgccacgatcgccaggatgccgagcgtgaaccacgggatgttgcgcttcttcggcaccgcctccagctcggcgcgcagcggcgccggtgcctcggtatcggtttccaggtagcgcgccagcccggccaggtgaccggcaccgaccaccgccagcacttcacgctgctgcggggtgtgctcctcgcgcaggcgcgtggccatgtagcggtcgcgctcgccgatgatggtttcgtacagcgccgggctctcgctggcgaactcaccgaagctcgattccagcatgtcgccctgcttgagcttttcgatctcgttctcgcccacttcctcggacgagaacaggccggcgcccagcccggcaaccagcttcagcttgccgaagaacccaagccgctgcgacgcccggcggaaggtcaggccgacctcgcggtcgatcaggtgcaccggcaggtcgcgttcgcgcgccagttccaccgcgcgtttcagttccgcgcccggctcgatgtcgagctgttcggccaggcggcgctggtaggcggacagggccaggttggcggcgaacagggcgacgcggcccttgcggatcacctcgaccaggtcgagcttggccagcgtgtccgggtcgctcagcgcctgcaggcgctgcgggtccagttcaacggccacggcgtcgaagcgaccgctgtcgatggctttctccaccgcctcgacgctggcgcgtgagacatgggcggtgcccagcagggtgtagcgcacgccgtcgcgttcgacgacgcgcaccggctggccggcgaacaggtcgtcaccggtctcgggaagggtttcggtcatgggttcattcattggaaggtgcggtgtcggcgccatcgccgagcgcgcgctgcatctgcacggtgtccagccagcggccatgcttgcggccgaggccacggaacacgccgaccagctcgaagccgaagcgttcgtgcagcttgattgaagcggtattggtcggttcgccgatcaccgccaccatctgccggtagccacgcgccacgcaggcgtcgatcaacgcctgcagcaggccggtgccgacgcccttgccctggaacgcggcatcgacgtagaccgagttttccacggtccactggtaggcaacgcgggtgcggtaggtgttggcgtaggcatagccggccacctggccgtcaatctcggcgaccaggtaggggaagccgcggtcgatgatgtcgcgcatgcggcgcagcatctcggacgcgtccgggatgtcgtactcgtaagtgttgacgaagtcggtcacttccaccgcgtagatcgcggtgatcgcgtcgatgtcggccgggccggcatcacggatgaggacggccatgcgcgggctccggctcagtcgatgtagcgcttgagcaggtcgccgtaggcatcgatgcggcgatcacgcaggaacggccagatgcggcgcacgtgctcgctgcgctgcaggtcgacgtcgcacagcagcacggtggcctcggtgccggcctcggccaggaactcgccctgcgggcccagcacgtggctgttgccccagaactggatgcccgacgcgcccagcggcgaggcctcgtggccgacgcggttgcagctcagcaccggcaggccgttggccaccgcatggccgcgatggctcagcacccaggcgtcgcgctggcgggtcttctcgtcctgcacgtcgtccggatcccagccgatcgcagtcggatacagcagcagctcggcgccggccagcgccatcaggcgcgccgcttccgggtaccactggtcccagcacaccagcacgcccaggcggcccaccgaggtatcgatcggcttgaagccgatgtcgcccggggtgaagtagaacttctcgtagaagcccgggtcgtccgggatatgcatcttgcggtacttgccgagcagcgtaccgtccttctcgaacaccacggcggtgttgtggtacagcccggcagcgcggcgctcgaacagcgagccgaccagcaccacgccatgcttcttcgccagcgcgccaaggcgctcggtgctcgggcccggaatcggctcggccaggtcgaactcgtccaccgattcgtgctggcagaagtacgggccgttatgcagttcctgcagcagcaccagcttggcaccctgcgcagccgcctcggccacgcgtgcttcgatcaccgccaggttggcggcggcatcaccgtggttgcgctcctggatcagggcgacggtaagggggctgcgcgagttcatgcggggcgttcctgcgggggaaaaccagcatgttagcgcggatgggcggcgacggcgtgtcgcgcgctgaatggcgcagcgggtagtgccggccgctggccggcaatcccgtggatcccatcaggcattgcagggttgccggccagcggccggcacgaccgttacgccttcaacagcccagccggcagctgcatggtgatgcagtgcaggctgccgttctgccagatcagcgagcggcagggcacctgcacgatctctcggcccgggtgcgcctgtgccagcacgtcgcgggccaggtcatcggccgggtcgccataggccggcatcagcaccgcgccattgacgatcaggtagttggcgtacgaggcagccaggcgacggccttcgtcgatcaccggccgggcccacggcagcgggaacaggcggtacggctggccatccctggtacgtagcgcggccagctcattgcccatcgcctgcagttcggcgtaatgcgagtcgctctcgtcgtcgcaggcctggtagacgatgctgtcagccgaggcgaagcgggcgagggtatcgatgtgcgcgtcggtgtcgtcgccttccaggtagccgtggtccagccacagcacgcggtcctgctgcagccagtcggccaggtcggcgctcaggctggcgcggtcgcggtccgggtggcgctcgtgcaggcacttccaggtggttagcagggtgccttcaccgtcggtctcgatgccgccgccttccagcgcgaacggaatgctgcggaccggcgcatcgttgaatacgccggcctggtcgagcacgcccaccagctggtcatccagggtggcgtcgaacttgccgccccagccggtgaagcggaaatccagcagctggaagccgccgtcggcacggcgcagggtgatcgggccggagtcgcgcagccaggtatcgtcgtaggccgccgtggtgaagtggaccttgtccatgtcgatgcggttggagcgcagtcgcatctcggcgtaggtctccacatcgtcgtcggccacgcagatcagcaccggctggaagcgggtgatggccgcgaccagggcgatgtaggtctcttccacctggcccaggcggtcggcccagtcggtatcggcggtgggccaggcaatcaggacgccgctctgggcttcccactcggcaggaaaacgaagggtctggttcatggtctcgctacacaggcccgcccacggcgggtaatgggatcaacggatcggcggtttcgggccgatttcgttcgggtccgcctggttggccaccacgtcgatcaccttctgcttctcgaagtagacggtgaactgcgggtacacccagcggttgatggtcggccattgccgtttctgcccgccacgcggctgcagctgctcgctgggcgcgccgaactgcgcctgcacctgctgcatgctctggccgcgcacgggcagggcaccggccggcttctcacgggcgcggtcgacaagcagggtatcggccagtgccggtgtggcggcggccagggtggccatcacggccagggcggacaggtaacgcttcatctcgatctactccccagtggtcaagaaaggcgattacagcaaaaacggcaggaaaaagccgcataaacaaaaaaccgcccgaaggcggtttcttgcatcgggtcggccccgcgtagggccagccgcagccggaaggctgtgagacttagcgctgacgcgccttgaaacgcgggttcgacttgcagatgacgaagatcttgccacgacgacgcacgaccttgcagtcacggtgacgggccttcgccgacttcagggaggacaggactttcatggcatacctcggcgtaaacagtagttgttcgggtggagcgtggccgcgatatgcgaaagacaatcggcagttgacgctcgttcaagcccgccattctaccgggcttttcctcgtggtttcaagtggttgcacaaaagatcccgctgggggcgtctggcaggggctagaatggcctcttcacacgctctgggacccccatgaatccactcgctcccgtcctgaccatcgacggcccatccggggccggcaagggtaccatcagccgcatcatcgcgcgccggatgggctggcattacctggattcgggcgcgctgtaccgggcggtgggcgtggccgcaagctgggccgacatcgatacctccgacgcctcggcgctggtgcgttgcaccttcgacacccacgttcagtttgtcgagcagggcgatgccatgcgggtcatggtcaacggcaccgatgccaccgacgagctgcgcctggagaccaccggtgcgctggcctcggccattgccgccattcccgaggtccgcgctgccctgaaggagcgccagcgcgcattcagggagctgccgggcctggtcgccgacggccgcgacatgggcacggtgatcttcccggacgcctcctacaaggtcttcctgaccgccagtgccgaggagcgcgccgagcgccggcataagcagttgaaagacaagggggtttctgttaactttgatgacctcctgcgcgagatcatggcccgcgacgcccgtgatgcccagcgtaccgtggcgcccctgaagccggcagacgatgctgtcctcatcgacaccacaggcatcggcatcgatgatgtcgttgccagagtgatggatctgcttccggttccggctgcctgatccgttcgcgcgggagcgctgccagcagcatcggcggtggtcgcgcatagcagtgctgtaccagctccgtcgcgcaatgatgcgtggcggttttcctactacacacgacctgcgtttccggggtcgaccaacaggcgggcggtcgccattcccctgaaggggacgccaccgacccatgtgtccaacagagtaaatctaatgaccgaatcatttgccgaactgtttgaagccagccaggccaatctggccaagctgaagccgggcgccatcgtcagcggtaccgttgttgaagtccgcggcgacgtcgtggtgatcaacgctggcctgaagtccgaaggcatcgtgccgatcgaacagttccgtaacgacgctggcgaaatcgacgtcgccgaaggcgacatcgtcaaggtcgccctcgactcgatcgagaacggcttcggcgaaaccgtcctgtcgcgcgagaaggccaagcgcgcgatggtgtgggacgagctggaagaagcgttggaaaagaacgaaaccatcaccggccgcatcagcggcaaggtcaagggtggtttcaccgtggacatcaaggatgtccgcgccttcctaccgggttccctggtcgatgtgcgcccggtgcgcgatccggcctacctggaaggcaaggaactcgagttcaagctcatcaagctggaccgcaagcgtaacaacgtcgtggtctcgcgccgcgctgtcgtcgaaagcgagcactcggaagagcgcgagcagctgatggacaagctgcaggaaggcgcgatcctgaagggtgtcgtcaagaacctgaccgattacggcgcgttcgtggacctgggcggtatcgacggcctgctgcacatcaccgacatggcgtggaagcgcgtgcgtcacccgtcggaagtcgtgaacgtcggcgacgagctggacgtccgcgtgctgaagttcgaccgcgagcgcaaccgcgtttcgctgggcctgaagcagctgggcgaggatccgtgggacaacatcggccgtcgttacccggccaacagccgcgtcttcggcaaggtctccaacgtcaccgattacggtgcgttcgttgagatcgagccgggcgtcgaaggcctggtgcacgtctcggagatggattggaccaacaagaacgtcaacccgtccaaggttgtccaggttggtgatgaagtcgaagtgatggtgctggacgtcgatgaagagcgtcgccgtatctcgctgggcatgaagcaggttgccgccaatccgtgggaaaccttcgctgccacccacaagaagggtgacaaggtgtcgggccagatcaagtcgatcaccgacttcggcatcttcatcggcctggacggcggcatcgacggcctggtccacctgtccgacatcagctggaacaccaccggcgaagacgtcgttcgcaacttcaagaagggcgataccctggacgccgtcgtcctggctgtcgatccggagcgcgagcgcatctccctgggcgtgaagcagctggagcaggatccgttcggccagtacatggctgccaatccgaagggctccaaggttgaaggcgtggtgaaggaagtcgacgccaagggcgcgatcatcgagctggctgacggcatcgaaggttacgtctcggcccgcgacatcgccaacgagcgcgttgacgacgccacccagcacctgaaggtcggcgacaaggtcgaagccaagttcgtgggcatggaccgcaagggccgtaccctgcagctgtcgatcaaggccaaggacgacgcggaaatgcgcgaagtgctggaggaataccagtcctcttcggcttccagcggcaccacccagctgggcgcgctgctgcgtgcacagctgaacggcaacaagtccgagtaatcggccttacgctgttcgttgtttcctggacggcccgggcattgcccgggccgtttcaggctgagatgcccctgatgtgagccggtaatgaccaaatccgaactgatcgaaatccttgcgcgccgccaggcgcacctgaaggccgatgatgtcgatctggcggtgaagtcgttgctggaaatgatgggcggatcgctgtccgccggggatcgcatcgaaatccgtggatttggcagcttctcgctgcactatcgtccgccgcgcctgggtcgcaacccgaagaccggcgaatcggttgccctgccgggcaagcatgtcccccatttcaagccgggcaaggaactgcgcgagcgggtcagcagtgtgctgccgctggacgccgatccggcctgagctttccgtcgcgccaccgcgtgcgaatccagccgcgagtcggataagctacggactcctgccactggagctgtcgcatgaaggtttttcgtctgctggtcctgctggcggtactcattcttgggttgatcatcggtgccatgaacatggacgagatgaccatcaacctgctgttcacccagcttaagacctcggtcggcgtggccatcattgccgcgttgctgatcggcgtcatcgttggcgctggcctggtgctggtgagcgtggtcattccgctctacagccagctgcgccgcgccaacaagtccgctgccgccacgccggcaccggttgcttcccctcaatcttttgatggacgctgatcgaagatggatttcgtcaccgagtggttctggttcttcctgttcgttccgctggccgccctggctgggtgggtgatcgggcggcgcggtggtcaacgccacggtgacagccaggtcagccgcctgtcgagcacctatttccgtggcctgaactacctgctcaacgagcagccggacaaggccatcgagctgttcctgcacatcgccgagctggacaaggaaaccttcgagacccaggtcgcgctgggccacctgttccgccgccgcggcgaagtcgaccgcgccatccgcctgcaccagggcctggtcaaccgccacgacctcagtgatgcacagcgcgtgcaggccctgctggcgctgggcgaggactacatgaagtccggcctgctggaccgtgccgagaccgtgttcaccgagctggcgcagctggatcagcgtgcaccgcaggcactcaagcacctgatcggcatctaccaggccgagcgcgactgggaaaaggcgatcgacaacgcgacccgtttcgaggacgtcaccggcgagccgatgggcaagctgatcggacagttcgaatgcgaactggccgaacgtttccgtggcgccggcaagctggaagaggcgagggcagcgatcgcccgcgcctaccaggccgacgcgatgtcggtgcgcgccggcatcatcgagggccgcctggaaaccgacgcgggcaatccagaggccgctgtgcgcgccttcgagcgcgccgcgcgcaacgatcccgaatacctgccggaactgctgccggcactgatgcagaactatcgcagggtcggcgatctggcaggtgcacgcgcgttcctgtcggagatgaccgagcactaccgcggcatcgccccggtactggcgctgacccggttgatggaagagcaggaaggcgtggcgccggcccgtgcctacctcggtcgccagctcaaggatcgcccgtcggtacgtggcgaatccgcgctgatcgatctgaccctcgccgagggagccgattccaccgccaccctgcatgacctcaagcacatcaccgaccagctgctggtgcgcaacccggcctatcgctgcacgcgctgcggcttcggtgcgcgtacccaccactggcagtgcccgagctgcaaggagtgggggacggtcaagccgctgctgaactacgcggtgctctgatccatgccctggcttgtgatgggcgcgctgctggggctcgccctgctcagtgcgttgctgacctgggctgcgcggggctatgcactgcgccagcagttgatggaccagccgggcgagcgtcgcagccatagcgttgccaccccgcgcggtggcggcatcgccatcgtcatcagcctgctggtgaccgccggcgtggccatctgggcctggcccgaaagcacgccgacggtgctgggggccagccttgggctggtgctggtggccggtatcggctggtgggacgaccacaagcccctgccggcgatgcgtcgcctgctggtgcatttcatcgccgcagcgctgttggccggcctggtcaaggtgaatggtggcagctggctgttggcggtgctggtgctgctgttcaccgcgtcgctgatcaacatctggaacttcatggacggcatcaatggcatcgccgccagccaggccgttgtggcgatgctggggctggcgccggtactgccgtggccctattcactggccgccgtggcgctgggcctggcctgccttggattcctgccgttcaacttccctcgcgcccggatcttcatgggcgatgttggaagcggcgcgctggggtatgcggtcgcagtggtgctggcgatcgccagcgtgcgtaccgatatcaactggatcctgctgctggtaccggtttcgccgttcctcgtggacgcgggcttcacactgctggcgcgcatcatttccggacaacgctggatggaaccccatacccagcatgtctaccagcgcgcggtgcaggcaggagccagtcacccgcaggtgacagggatgtactttgctttgggtctgttcagtattacagtgttcaatgtctgctccaatttgcagccgaggtgggaggctgtcgtggcgatcgcgtggttcatcgcgctgagcgtcctctggctcctcctgcgcaatggaatgcgccaccgacaaggaattacctgaattatggcttcaccctggcgggacagaatcctcggcctgatgccgcgttcggccatcgtctgccacgacctcttcatggtctgggcatgctggcagctgctccatgcagggcgttactcgatcctgcccaacgccccggcgctgcccctgtggaacgtcgataccaccctggtcctgctgctgcagggcctggtgttctggcgcgtgggcctgtaccgcggcctgtggcggtttgccagcgtcagcgacctgctgaacatcttcaaggccagcttcatcggcatggtggccatcatcctggtgctgatgtggaagcgcttcgacggcgtacccatgtcggtgctggtgatctacccgttcgcgctgtcggcactgctcggcgcgccgcgcctgctgtaccgcgcctggaaggactaccaggcactgcagtccgattccagcgcccgccgcgtgctgatcctcggcgccggccaggcggccgagaccctggtgcgcgacctgcgccgctccggcaacttcgagccggtcggcctgctcgacgatgcaccgcacctgcgtggcgccaagctgcagggcctgccgatcctgggcacgctggatgacgcgccgacggtggtccgcgagaccgctgccaagctgctggtcattgccatgccgtcgctggacgccgcaggcatgcagcgcgtcgtcgcgatctgcgaaagcaccggcgtgccgttccgtaccgtgcccaagctcagtgacatcctgcagggccagtcgctgccgggccagctgaaggaagtggcgatcgaggacctgctggggcgcaagccgatcatgccggactggaacctgatccgcggctggttgggtgggcgcaccgtgatggttaccggcgccggtggttcgatcggctcggagctgtgccgccagtgcgcgcggcatggtgccggtcgcatcatcctgctggagatcagcgagctgctgctgctgaccatcgagggcgagctgcgtcgcagcttccccgatgtcgagatcgaggcggtgctgggcgactgcggtgacccggcggtgatccgccacgcgctgtcgctgcaccccgtcgataccgctttccatgcggccgcctacaagcatgtaccggtgctggaacgccagctgcgtgaagcagtgcgcaacaacatcctggcgaccgagaacgtcgcgcgcgcctgcctggaagcccgcgtggagcatttcgtgttcatctccaccgacaaggcggtcgacccggtcaatgcgctgggcgcaagcaagcgctacgccgagatgatctgccagagcctggaccagaagtccacgcatacccgtttcgtcacggtgcgcttcggcaacgtgctggcgtcggccggcagcgtggtgccgctgttccgcgagcagatcctgcgcggtggcccggtcacggtcaccgacccggaagtcagccgctacttcatgaccattcccgaggcctgccagctgatcctgcaggcggccgcatcggcgtcgcatggtgcgatctataccctcgacatgggcgagccggtgccgatccgcgtgctggccgaacagatgatccgcctgaccggcaagcagccgtacaaggacatccagatcatctataccggcctgcgtccgggcgagaagctgcacgagacgctgttctattcggacgaagattaccgctccaccgcgcacccgaagattcttgaagccggcgtgcgtacgttctcgcgcgacctggtgctgggcaacgttccgcgcctgcgcgaggcgattgccagctacgacaccgcccgcatccaggaaatcctgtttgcgacgatgccggaattctcgccaatcgaacaggatgcttacatttcatccgctaaagtcgtgccttttccggcacgtgaggccaacaggcaccaatgagcaagcgaattcgcaaagcagttttcccggtggcaggattggggacgcgttttttgccagcaaccaagactgtgccgaaggagatgctgccgatcattgatcggccgctgatccagtacgcggtggatgaggcgatcgaagccggctgtgacacgctggtgttcatcaccaaccgctacaagcacgccgttgccgactatttcgacaaggcgtacgagctggagcagaagcttgagcgcgctggcaagcaggagcagctggaactgatccggcacgtgctccccaatggtgtgcgcgcgatcttcgtgacccaggccgaggcgctgggcctcgggcacgcggtgctgtgtgccaggtcggtgatcggtgacgagccgtttgccgtactgctgcccgacgacctgatctggaaccgcggtgcgggcgcgctgaagcagatggccgacctcaacgaagccagtggcgccagcgtgatcgcggtcgaagacgtgccgcacgataagaccgccagttacggcatcgtcgccaccgacgcgttcgatggccgcaagggccgtatttcgcagatcgtcgagaagccgaagccggaggacgcgccgagcgacttggcggtggtgggccgttacgtgctcagcccgaagatcttcgagctgctggaacagacccagaccggtgccggcggcgagatccagctgaccgatgcgattgccgagctgctgaagaccgaagaagtcgatgcctatcgtttcgagggcacccgcttcgactgcggcacgcacctgggtctggtggaggcgacgatccgcttcgcgctggacaacccgaagctggctggcccggcgcgggagaagctggcggcgatgctggcggaataagggttttatcaagcgctccgtgcggcgccttgattgatacgtgggggagggggcgggtggccctctccaaaacacgccaaagcccttcaatggtgctcgatggcgccatccatggcgccaacggttttggagagggccatccgccccctctcgacagtttccgtgtggcgcggacgggaagggcggaatcaaaggcagaagcaaaagcaaaaaggcagccactggctgccttttttcgtgggttggggtcagatccctttgcgcagcaaagggatctgaccccagcctttgaccctgcctttgctcatccctccgccgcggggaggctggaagggccgggttggcagggctgcccgggaccgttggcgccatggatggcgccatcgagcccccatggaagggttcacggcgtgtcccgggcagccctgccaacccgacccacgccatgaagcccaacgaggcaacgccttgaaccttacagcgcctcgaaaatacccgccgcacccatgccggtgccgatgcacatcgtcaccatgccgtacttctgctggcgacgacgcaggccgtgcagcagggttgcggtacggatcgcgccggtcgcacccagcgggtggcccagggcaatcgcgccgcccagcgggttgaccttggccgggtccaggccgcagtcacggatcaccgccagcgactgcgcggcgaaggcttcgttgagctcgatccagtccagctggtcctgggtcaggccggcctgcttcagtgccttcgggatcgcggcgatcgggccgatgcccatcacttccgggcgcacgccggccaccgagaagctgacgaaacgggccagcggggtcaggccgtaatccttgatcgcctgctccgaggccagcagcacggcgccggcgccgtcgctcatctgcgacgagttgccggcggtgacggtgccgccgaactggccgttgcggaacaccgggcgcagcttggccaggccttcggccgaggagtccgggcgggggccttcgtcggtgtcggcgatcttgttgcgggtgatgatgcgctggccgtcggccaggtccggcaggtgcgagacgatctcgtacgggctgatctcgttcttgaactcgccgttctggatcgcggccatggccttctggtgcgaggccagggcaaaggcgtcctggtcttcgcgcgagaccttccactcttcggcgaccttctcggcggtgatgcccatgccgtaggcgatggcaacgtggtcgttgtcgaacacgctcggcgccatggcgatcttgttgcccatcatcggcaccatcgacatcgactcggtgccgccggccagcatcaggtcggcgttgcccaggcggatcgcgtcggcggcctgcgccacggcctgcaggccggaggagcagaagcggttcacggtctgtgcggcgatggtgttcggcaggccggccagcagcacgccgatgcgggccacgttcatgccctgctcggcttccggcatggcgcaaccgatgatggcgtcatcgatgcggttgacgtccacgcccggggcctgggcgacgacgctgcgcagcacgtgcgcaagcatgtcgtcggggcgggtgttgcggaacatgcccttgggcgccttgccaaccggggtacgggtggcggcgacgatgtaggcgtcctggatttgcttggtcattgcagtgatctcttgaattttttagccggagtgccgaccaacggtcggcacccaccggaagcagggatgggcgatcagttacgcagcggcttgccggtcttcagcatgtgcgcgatgcgggcctgggtcttttcctgctgggccagttcgacgaagtgcttgcgctccagggtcagcagccactcttcgtcgaccagggtgccgcggtcgaccttgccaccgcacagcacggtagcgatgcgctcggcgatctcgtagtcgtacgggctgatgaagcggccttccagcatgttgaccagcatcatcttgaaggtggcgatacccacgtcaccggccacctggatgcggcgtgccggcagcggcgggcggtaacccgcttcggccagggcgcgtgcttcggccttggcgatgtgcagggcctcgtagctgttgaacaccaccttgtcggtgctgcgcagcaggcccagttccttggcgttgaccgccgagttggacaccttggccatcgccacggtctcgaaggtcttcttcagttcggcgaacacgtcgccgcccgggcccgcggcctgcgaggcgcgcacggccagttccttcaggccaccaccggccggcagcaggccgacgccggcctcgaccaggccgatgtagctttccaggaaggccacggtcttggcgctgtgcatctggaactcgcagccgccacccagggccaggccgcgcacggcagccaccactggcaccagcgagtacttgatgcgctggctggtgcgctggaagttggcaaccatttcttcgaactggtcgaccttgccggcctgcagcaggcccagcgcgccggccaggtcggcaccggcggagaagggttccttctgctgccagatcaccaggccctggaagtccttctcggcgcggctcacgcattcctgcaggccgtccagcacctggtcggacacggtgttcatcttggtcttgaagctgaccacggcgatgccatcaccatcgtgccacatgcgcaggccgtcgttctcgaacacggtctcgcccggcgcgaacgtttcgcccagcagcggatcggggaagcgctggcgctggtacaccggcagcgacgagcgcggcagcttggcgttgcgcgacgggctgtagctgccttcggcggcatgcacgccatcgcggccatcgaacacccagtccggcagcggcgcgctgctcatgctcttgccggccacgatgtcatcggcgatccactgtgcgacctgcttccagccggcagcctgccaggtctcgaacgggcccagcgaccagccgtagccccagcggatggccaggtcgacgtcgcgcgcggtctcggcgatgtcggccaggtggtaggcgctgtagtggaacaggtcgcggaaggtcgcccacaggaactgcgcctgcgggtgctggctctcgcgcaacttggcgaacttctcggccgggttcctgatcttcaggatctcgaccacttccggcgcggcagcgcgatcggccggacggtagtcctgcttctccaggtccagcaccacaatgtccttgccgaccttgcggaagatgccggcaccggtcttctggcccagcgcgcccttggaaatcagcgcgtccagccacttcggcgacttgaagaattcatgccacgggtcattcggcagggtgtcgcccatggtcttgatgacgtgggccatggtgtccaggccgaccacgtcggaggtgcggtaggtggccgacttcgggcggccgaccagcggaccggtcaggccgtccacttcatcgaagcccaggccgaactgctgggtgtggtggatggtggacaggatcgagaacacgccgatgcggttgccgatgaagttcggggtgtccttggcgtacaccacgcccttgcccagggtggtgaccaggaactcttccaggccttccagcacggcggcgtcggtggtggtggccgggatcagctcggccaggtgcatgtagcgcggcgggttgaagaagtgcacgccgcagaagcggtggcgcagctgctcgggcagcacgtcggccagcttgttgatgcccaggcccgaggtgttggaggccagcaccgcgtggtcggccacgaacggcgcgatcttcttgtacaggtcctgcttccagtccatgcgctcggcgatggcctcgatgatcaggtcgcagtccttcagctgctccaggccggactcgtagttggccggagtgatggcttcggccagcgacttgctggccagcggtgccgggctcagcttgcccaggttggcgattgccttcagcacgatgccgtcggccggaccctccttggcgggcaggtcgaacagcacggtgtcgacgccagcgttggtgaggtgggcagcgatctgggcacccatgacgccggcacccagcacggcggcgcggcggactagcagggaattggacatggtgtagggcctttgttggtcagcagttactgggtggaatcaaagggaagcgggcagggcgctggcgcgagcggcggcgcggaacccggcttcggcgaaatggatcagttcgtgggcggcatgggcacgatgcgccgcttcagtgacaccggcgggacgcttgatcagcccgaagtcggccatggcataggtgagcgagccggccaggaaatccaggcgccagtacagctcttccttgctcaggtcgggtacgcactcgccgatggccttgccgaacgcacgcagcacgtggccgtagtggtcggacaggaacttgcgcaggttgtcgttcttctcggcgtaggcgcgggcgatcacgcgcacgaaggcaccgccgttctggcggtcctgggccagcgccaatgccggctcgacgaacgcggccagcaccgggcgcagctgcccggggtgttcgctgcgggcgcgttcgagctgcgacaggcgggcgccggtcatctcgtccatgcggcggcggaacacctcgttgaccaggttctccttggagccgaagtggtagttgaccgctgcgatgttgacgtcggcctggctggtcacctggcgcagcgaagtgccggcgaagccgtgctgtgcgaacagctcctcggccgcgccgagaatgcggtccttggtcgagaagtgggcgggtttggccatcggcgggcggaccttaatcaaacgattgtttgatactaggaccagacggtagcgtatggcattttgcagtgcagcaaaatcggccggtccggtcagatttcactcaggtgggtgaatggggtaggggtcggatccccgcaggggctccgaccccgacactgggcccggaacggggtcagagcccctgtggggatctgacccctgccatgagggtttgccggccggcgaccggcactaccacgccagcgctttatcttttacaattcgcctacgtttatcaggctaagcccgcgtcccgacgcgggtttttttcatgttacccttcgggccatcagcggcccgattccattggagacatcccatggcgctggagcgcaccctttcgatcatcaagccggacgccgttgccaagaacgtcatcggcgaaatctacgcccgcttcgagaaggccggcctgaaggtcgtggccgccaagtacaagcagctgtcgcgccgtgaagccgaaggcttctacgccgtgcaccgcgagcgtccgttcttcaacgcgctggtcgaattcatgatctccggcccggtgatgatccaggccctggaaggcgagaacgccgtcctggcccaccgcgacctgctgggcgccaccaacccgaaggaagccgcgccgggcaccatccgcgccgacttcgccgaatccatcgatgccaacgccgcccacggctcggactcggtcgagaatgccgcgattgaaatcgcctacttcttcgccgccaccgaagtcgtttcgcgctgagagtaatgccgtgaacgaggtcgtacagtcccccgccatccagccgctgccgaagtcggcacccacggctggcaagcagaacctgctcgacctcgatcgcgcgggcctggagaagttcttcgtcgaggttctcggcgaaaagaagttccgtgcccaccaggtgatgaagtggatccaccatcgctacgtcaccgatttcgatgaaatgaccgacctcggcaaggtcctgcgcgccaagctgcaggcccatgccgaggtgctggttccgaacatcgtgttcgacaagccctccgccgacggcacccacaagtggctgctggcgatgggcgtggatggcaagaacgccatcgagaccgtgtacatcccggacaagacccgcggcacgctgtgcgtgtcctcgcaggtcggttgcggcctgaactgcacgttctgctccaccgccacccagggcttcaaccgcaacctgaccaccgccgagatcatcggccaggtgtgggttgccgcgcgccacctgggcaacgtgccgcaccagatgcgccgcctcaccaatgtggtgatgatgggcatgggcgagccgctgatgaatttcgacaacgtcgtgcgcgccatgagcgtgatgcgcgacgatctgggctacggcctggccaacaagcgcgtgaccctgtcgacctccggcctggtgccgcagatcgaccgcttgtccgccgagagcgacgtgtcgctggcagtgtcgctgcatgcgccgaacgatgcgctgcgcgaaaccctggtgccgctcaacaagaagtacccgatcgccgagctgatggcctcgtgcgcacgctacctgcgcgccaacaagcgccgcgaatcggtcaccttcgaatacaccctgatgaagggcatcaacgacaagcccgagcatgcccgcgaattggcccgcctgatgcgccagttcgacaacgcggtgcaggccaaggattcgggcaaggtcaacctgattcccttcaatccgttcccgggcacccgctacgagcgttcggaagaagcgcacatccgcgccttccagaagatcctgctcgacagcaacgtgctgaccatggtccgccgcacccgtggcgacgacatcgacgccgcctgtggccagctcaagggccaggtgatggaccgcacccgccgccaggcggagttcaacaagacgctgcaggcggggaaggggagcgatgccgcggcctgaccgcctctggctggcgcttctcgcaggcgtgctggccgttgcggtcggcggctgcaaatcccatcccaaggccaagctcggtccgagccaggcgccggtctattcggtgggtgacccggaaagcgtgcggcgcgaagtgcgctggcgcgacctgttgacgctggcgacccgcgacatgcaggtcggcaatctcgatgccgccgagcgcaaggtgcgcgaagcactgaagctggcgcccgaggcgcccgatgcgctggtgctccaagccggcatcgatgaccgtcgtggccgcacccgccaggccggtgagaacttccgcaaggccgccgaactggcgccgcagcgcggcgacgtgctcaacaattacggtgcctggctgtgccagcagggccagccggccgaatcgctggtctggttcgaccgcgcgttgcaggcgccgggttatgccaccccgggcgaagcccaggccaatgccggcagctgcgcactggatgcgggccagcttgaacgcgccgaacgcgacctgcgtgcggcgctcgtggcggccccggccaacccggtcgcgctggagtcgatggcccagctgagctaccgccagggccgctacatggaggcccgggccttcgccgaacgtaggattgcggctgcacccgcaacgcgttccgtgttacaacttgcgtctcaaatcgaagtgaagctgggcgatcgggcggcatctgatcgttatctgcagcggattcgacaggaatttccgcaggacgcgggctcctaactccagggttgatgcattgtgattgatgaccagactgtgagcgctctcgagactgcggccggctgcggcacccgcctgcgccaggcccgcgaagcggccggactgaccctcgaagatgtcggctcgcgcctgcgcatgccggtccaggtggtcaagtcgctggaagaggaacaatggcagaagctgggggcgccggtgttcgtgcgtggccagctgcgcagctatgcgcgcctgctcgacgtggatgtcggccagctgctggaacaggcccaggtcggcccggtggttccgcccaccctggtcagccatacccataccccgcgtgcgcgccgcatcgccgagaacctcggccggcgcgtgctgtatgtcggcatcaccgccgtgctggcggtgccggtgtggttcgccacccgtggccacttcgacggcagcgcgaccccgtcgccgagcaccgcctcgctggatgtgatcccggccgccgtgccggttaccccgtccacggccggtgccgaggctgtcgcgccggccgaagcggccaccgccccggccagcaagccggcggccaccccgtacgtggcctcgctggccccggtgccgcgcccggcgccggctccggcggctgccggcaacgcgctggaaatgcagttcagcggcgacagctgggtcgacatcggcggcccggacggcagcaccgtcgagaaggcgctgatcaggtccggcgagacccgcagcttcacgccgggccaggtgacccgggtgaccctgggcaacgcctcggcggtccaggttcagcagaacggcgctatcgtcgatctgaccccctaccagcgagccaacgtggcacgctttcaggtatcctctgaaggctccgtggtcccggtttcgcactgaggcgcggtttcaccaccttcgataatcccaatggtccctcccgacgggcggggcgagagtacgcatggcgatcgacgatctgctcgacgagcacgaacaaagtgaacgcgtccgcagctggctgcggaagaatggcgccagcatcctcggtggcgtagtcatcgccatcggtgccattgctggctggcagtggtaccagaaggatcagggcggcaagctggcctcggccaatgtcgagtaccagaaggccctgcagggcctgcagcagaacaagcttgacgacgccgccaaggcggtcaaggcgctcgaagccggcccgtccagcatctacggcgacctcgcggcgctgcagctggccaaggcccaggtcgacgccggcaagaatgaagaggcactggcaaccctgcgcaatgtgaaggtcgaaggtgacctgcagcgcgtggtcgaccagcgtgtggcccgcctgctggtggccaccggcaagagcgacgaggccatcaagctgctgggcagcgcgaccgacagcagcagcctggaaatccatggcgatgcgctgatggcgcagggcaagcgtgatgaggcccgtgcacagtacgagaaggcgctgaagacgctggacgtggcagcgccgcagcggcgcctgctggaaaccaaggttatggacgccggcggcaccgtcgccgcccctgcggagtcggtttgatgagtcagaaggtcatgatcacccgcgtcgccaccgtgctcctgatgggcatggccctgaccggctgcagcaccatgaagggctggttcgccggcaaggacgcggccgcgaagaaggcacaggaaccggctgagctggtcaagttcgagccgaccctgaaggtcagcaaggcctggtcggtcaacctcggcaagggcgagcgccgcatcggcgtgcgccagggcccggcagtggccaacggccacgtgttcgctgcggcgatcaccggtggcgtgcacgccatcgacctgcagaccggcaagaaggtctggacctgggagccgaagaaggaaaagaagaaggccaagctgcgcctgtccggcggcccgggtgtcggtgagaacctggtcgtgatcggcacgctggatggccaggtcatcgcgctggatatcaacgatggcagcgagaagtggcgcgcccgtgttccgggtgaagtcatcgccgcgccggccgttgcccagagcatggtctacgtgcgcagcaacgacggccgcgttaccggcttcgatgccggcaacggcacccagaagtggttcaacccgagcgagctgccggcgctgaccgtgcgtggcaacgcgccggtggtgaccggcccgggcgtgctgttcatcggcagggacgagggcgcggttgcggccctggcccagcaggatggccgcacgctgtgggaacagaacctcggcaacggcgaaggccgcaccgagctggagcgtatggccgacgtcgacggcgctccggtgctggagggcaacaccctctacgtgagcagcttcaagaaccagaccatggccatcgaaggcccgaccggtcgcccgctgtgggcgcgcgaccatggcggtgccggtggcgtggcggtgtcgtcgggcaatgtgttcgtcaccgacaacaagggcggcgtgttcggcctggacaaggccagcggcgcggccatgtggtcgcagaccgcgctggcccgtcgttcgctgaccggcccggcgctgcacggcgactacgtggtggtcggcgactacaagggatacgtgcactggttgcaggcgtccgatggtgcgatggcggcacgggcaaaaagtggcggcgacgccctgctggcccagccggtcgtcgcagacggggtgctgctggtgcagaacgttgatggcaagctgaccgccttccggttggcaaattaaaaattggagtaatcgcgatgctgcctttggtcgccctggttggacggccgaatgtcggcaagtcgactattttcaatgcgcttacgcgcacccgtgacgcactggtccatgaccagccgggtgtcacccgcgaccgcaactacggtgtctgccggctggacgaggacaatcatttcctcgtcgtcgacaccggcggtatcgcggaagaggaagaggggctggcaggggctaccacccgccaggcccgcgccgctgcggcggaagccgacctgatcctgttcgtggtcgacgcccgtgagggtacctcggcgatggacgacgagatcctggcctggctgcgcaagctgtcgcgcccgacgctgctgctgatcaacaagatcgacggcaccgacgaggacaccgtgcgttcggagttcgcccgttacggcttcggcgagatgctgaccgtgtcggccgcgcatcgccagggcctggacgacctgctggacgaagtgatccagcgcctgccggaagaaggcagcggcgaagagctggacaacgatccgaaccgcatccgcatcgccttcgtcggccgcccgaacgtgggcaagtcgaccctggtcaaccgcatcctcggcgaggagcgcatgatcgcctccgacgtgccgggcaccacccgcgactcgatcgcggtggacctggagcgtgatggccgcgagtaccgcctgatcgataccgccggcctgcgccgtcggtcgcgcgtggacgaggtcgtcgagaagttctcggtggtcaagaccatgcagtcgatcgagcagtgccaggtggccgtgctgatgctcgacgccaccgaaggcgtgaccgaccaggacgccaccgtgctcggtgccgtgctcgacgccggccgcgcactggtgatcgccatcaacaagtgggatggcctgaccgagtaccagcgtgagcaggccgaaaccatgctgtcgctgaagctgggcttcgtgccgtgggccgagtcggtgcgcatctcggccaagcatggttcgggcctgcgtgagctgttccgcgcggtgcaccgcgcgcacgaatcggcgaacaagaccttcaccaccagcgaagtgaacaaggcgctggaagtggcctacgagaccaacccgccgccgaccatccgcggccatgtctccaagctgcgttacgtgcatccggccggttccaacccgccgaccttcatcgtgcacggcacgcgcctgaaggaactgcaggagtcgtacaagcgctacctggagaacttcttccgcaagcgcttcaagctgatcggcacgccggtgagcttcatcttccgcgagggtaccaacccgtacgagggcaagaagaacgtcctcaccgagcggcaggtcaaggccaagcggcgcttgatgaagcacgtcaagggcaagtgattcacgagaaggcggccgcagggccgcctttttcgttgcggaggatggggtcagatcccattttctccggaaaagggatctgaccccgggtgcagggcgggcgctaccgcaggcctgcggtggacccgtagagccgagcataggctcggctctacagatgctggtcaaggcggcctgccgccacgtgcgcgataatgccgccatgagcatccaagagatttcccccgcgcaggcacgcgagcgcctggcccatggcgcggtgctgatcgatgtgcgcgaggcgcacgaacgggccggcggcatggccgagggcgcgcgcggcgtggccaagggcgagctgcaggccgacccggccgcgcatctgccgcggcacgaccaggaaatcctgctgatctgccagagtggcaagcgctcggccgatgccgcgcagttcctgctggaggccggctacacccacgtggcttccgtgacgggcggcaccgtggcctggcgcgagcagtcgctgccgctggtgcagccgctggccagtgctgccgaccgtgacttctttgatcgctattcgcgccacctgctgctgccgcaggtgggcgaggccggccagcgccggctgcagcagtcgcgcgtgctggtgctgggcgcgggtggcctgggcgcgccggctggtttctacctggccgccgccggggtagggcacctgcgcttcgccgaccatgaccgcgtggagcgcagcaacctgcaccggcagatcgtgcataccgaagccagcgtcggccagttcaaggtcgattcggcgcgcgagcggctgctggcgttgaacccgtcgatcgacgtcgaggcggtgcctgagcgggtcacgtccgagaacgtggatgcgctgctggccggggtggatgtggtgctggatggctcggacaacttcccgctgcgctacctgctcaacgacgcctgcatcaagcacgccacgccgctggtgtatgccgccatcgagcgctttgacggccaggtaagcgtgtttgacgctggccgccagcgtggcgtggcgccgtgctaccgctgcctgttccccgagccgccgccgccggaattcgcgccgaactgttccgaggccggtgtgctgggtgtgctgcccggcctggcgggtgtgctgcaggccaccgaggtgctgaagctgctgctgggcatcggtgagccgctggttggccgcctgctgcgcttcgacgcgctgggcatgcgatttcgtgagaccggcatccggccggacccgcagtgcccggtgtgcgcgccgggcgtgccgttcccggggtatatcgattacgccgcattctgccggggtgggtgaggctggccggggaatgccttggtagatgccgaccttggtcggcgttttcgtgccaaccaaggttggcacctgccgaagcgggtgcatgggttcgggatccggcatccggccggacccgcattgcccggtgtgtgcgccgggcgtgccgttcccggggtatatcgattacgccgcattctgcccgggtgggtgaggctggccggggcgtcatccgcgcatggcgtggatctactgtagagccgagcccgtgctcggctgcttctggcctcggcacgaagagcagccgagcgtgggctcggctctacaggttgtggttgtgccaaccaaggttggcacccaccgacgcggatgcatggtttcgggatgatgccgggggtcactcccggtatcgttccatctccaagacaatccggcgcaacatgcgtgctattgccgtcatcggcattgctctattgttgaacgcgattctggatcttggggaaaacaccgcatggcggtagaagcagcgaccagcgagctggtcaaggtcgtcgccctgttgggcgcggcggtggtgatggtgcctttgttccgtcgggccggcctgggctcggtgctgggctacttcgccgccggcctggcgatcgggccgttcgggctgggctggttctccgacccgcaggccatcctgcataccgccgaactcggcgtggtgatgttcctgttcgtgatcggcctggagatgcggccctcgcacctgtggagcctgcgcaaggaaattttcgggctgggcacgctgcagatcgtcacctgtgcgctggtgctgaccagcatcgccaagctgttcgggttgccgtggcaggtggccttcatcggtgccaccggctttgtgctcacatccaccgcagtggtgatgcagttgctggccgagcgcggcgacatcgcgctgccgtcggggcagaagatcgtttcgatcctgctgttcgaagacctgctgatcgtgccgttgctggcgctggtggcctggatgggcccgagcgcgggcagtgccgacggcgaaggttcgcgctggctgtcggtggcgatcggtgtgggtgccatcgtcggcttggtgctggtcggccgcttcctgctcaatccgttgttccgcgtgctggccgaatcgaaggcgcgcgaggtgatgaccgctgccgcgctgctggtggtgctgggtgcggcactgctgatgcagctgtccggcctgtcgatggcgatgggcgcgttcctggcgggggtgctgttgagtgaatcgaccttccgccaccagatcgaagcggatatcgagccgttccgcggcatcctgctgggcctgttcttcctcagcgtgggcatggcgctggacctgggcgtggtggctggcaactggcagctgatcctcggcctggtgctggcgctgatggtggccaaggcgctgtgcatctacgcggtcgcgcgcatcatgggcagcgaccacgcgcaggcgctggatcgcggcgtgctgatggcgcagggcggcgagttcgccttcgtgctgttctccgctgccgcctcagccggcgtgatcaacctggagatcaatgccaacttcaccgccgtggtggtgttgtcgatggcgctgaccccgctggtggtgctggtctacaagcgcatcgcgccgaagccgacggtgaacatggacggcgtggacgaggccgagggcctgtccggcagcgtgctgctgatcggcttcggccgcttcggccaggtcgccagccagtcgctgctggcgcgcgacgtggacgtgaccatcatcgacaacgatgtggagatgatccagagcgccgcgcgtttcggtttcaagatctactacggcgacggtacgcgactggacgtgctgcatgcctcgggcgcggccaccgcgcgtgcgattgcggtgtgcgtggacaaggccgaggccgccgaccgcatcgtcgaactggtgtcgcacgagttcccgcaggccaagctgatggtgcgctcgttcgaccgcgaacattcgctgcggctgatccatgccggcgtcgatttccagatccgcgagacgtttgaatcggcggtgttgttcggccaggccgcgctggtggaactgggtgcggatgaagacgacgcggtggagattgccgagcagatccgtcgccgcgatgccgagcgtttcgagctggagattgccggtggtggtttgaatgccggcgccaagatggtgttcggcaattcaggccagggcgtgccgacgccgacgccgttcaccgcgccgaagcgggcgagcaagacgttgaacccgcaggacgtgccggaagaggaagaataacgtttgcgggtcggatccctttccagcggaaagggctctggcccgctacgtcgtgctggggtcagagccctttgcctgtggcaaagggatccgaccccgtcaggaccccatccggcggtgggcgagggggcctgaatcagggacaatagcgtccccgccgccccacgcccgctcccgatgaccgattccgccccccagcatcctgcccgcatccttgacggccgccgcatcgccgaggacctgctcgacagcctgaaggtgcgcgtcgacgcccgcgtggccgccggttgcagccgcccgggtctggccgtggtgctggtcggtggcgacccggcctcgaccgtgtacgtgcgcaacaagcgccgtgccgccgagaaggtcggcatcgaagcgcatgactacgatctgccggccggtaccaccgaggccgagctgctcgacctgatcgaccagctcaacgccgatccgaagatcaacggcatcctgatccagctgccgctgccgggcatccccgatgcgcgccggctgatccagcgcatcgacccgcgcaaggacgtggacggcttccacccggaaaacgtcggccacctggccctgcgcgaattcggcctgcgcccgtgcaccccgcgtggcatcaccacgctgctgggccacaccgaccagccggtacgcggccgcaacgccaccatcgtgggcgtgagcaaccatgtcggccgcccgatgggcctggagctgctgatcgccggctgcaccgtgaccagctgccacaagttcacccccaaggacgtgctggaacaggccgtgcgcaacgccgacatcctggtggtggcggtgggccgcccgggcatcgtgccgggcgagtgggtgaagccgggcgcggtggtgatcgacgtcggcatcaaccggttggacgacggccgcctggtgggcgacgtcgggtttgaggccgccgcccagcgggcgagctggatcaccccggtgccgggtggcgtgggcccgatgaccgtggccacgttgatgcagaacacgctggaagcggcggaagcgctgagctgacctgcgattggggagatctgctgttggtgggtgccgaccgttggtcggcacaatgccgggcaggccgatgacccgctcctggtaggtgccaaccttggttggcacacatccatcggggccatcggcccatctggggtgccggtgccggacggatcgtgccaaccaaggttggcacctaccaaaggcggttccgtgggggttcccaggcggcgcgtggccccggtccgtcgccctgaaccaatcgccgcccgcgcgacactgcgtcgcatctaccccctgccacgcggcgcgaaaaaggggtaaaatgtcgcgcttccccacatctcgggtatgccgatgctgcgcatccaggctgaagcactcacttacgacgacgtctcgctcgtccccgcccactcgaccatcctgcccaaggacgtcaacctcgaaacgcggttgacccgcgacctgaagctgaagcttccgatcctgtccgcagccatggataccgtcaccgaggcccgcctggccatcgccatggcccagctcggcggcatgggcatcatccacaagaatctcagcctggaacagcaggccgcggaagtggccaaggtcaagaagttcgaggctggtgtcatccgcgacccgatcaccgtcggcccggaaaccaccatccgcgacgtgctggccctgacccaggcgcacaacatctccggcgtgccggtggtgggcagcgacggcctgctggccggcatcgtgacccaccgcgacatgcgcttcgagaccgagctggacgatccggtccgccacatcatgaccaagaaggatcgcctgatcacggtcaaggaaggcgccgcctccgacgaagtgctgcagctgctgcaccgcaaccgcatcgagaaggtgctggtggtcaacgattcgttcgaactgcgtggcctgatcaccgtcaaggacatccagaagaacaccgacttcccgaacgctgccaaggatctgtcgacccgcctgctggtcggcgctgccgtcggcgtgggtggcgataccgatcgccgcgtggaagcgctggtcgccgccggcgtggacgtgatcgtggtcgataccgcgcacggccactcgcagggcgtgctggaccgcgtcagctgggtcaagaagaacttcccgaacgtgcaggtcatcggtggcaacatctgcaccggcgaagccgcactggcgctgctggacagcggcgcggacgcagtgaaggtgggcatcggcccgggctcgatctgcaccacccgcgtcgtcgccggcgtcggcgtgccgcaggtcaccgccatcgacctggtggccgaagccctgcaggaccgtatcccgctgatcgccgacggtggcatccgctactcgggcgacatcggcaaggcgctggccgccggtgcctcgaccatcatggtcggtggcctgctggccggtaccgaggaatcgccgggcgagaccgagctgtaccagggtcgttcgtacaagagctaccgcggcatgggttcgctggctgccatggagaaggggtcgaaggaccgctacttccaggacgccgccactgccgacaagctggtgccggaaggcatcgaaggccgcgtgccgtaccgcggcccggtgggcggcatcatccaccagctgatgggcggcctgcgtgccaccatgggctacgtgggctgcgccaccatcgaagacatgcgcagcaagcccaagttcgtgaagatcagcggcgccggccagcgtgagagccacgtccacgacgtgaccatcaccaaagagccgccgaactaccgcgcctgatgcgcttgcgaactgctcttgcgattacgggcagcctgctgatggcaggctgttcgttgtctgaaccgccgccgcgctccgggtctccgggcgcggcggtttcgcaattgcaggacgtgcaggcctgccagaacgcgttctcgctgccgaagggctggcaggtgcagcccgcaggcgaacagcgctggctgctgaaaggtaccggcgagcgcccgctgcaggtcatcctgcggtgcgttaccgatctgggtgacaggcttgaagatcctgtggtcatcgccgagctggggccgctggagccgaaacggatgagcgcgcagtccgcgttctggggcaacgccgtggattccggttacccgatgcacgccatgcaacggcgcatcgtgcccggcaccgaagtgcaggaaatcgccgagctgccgcgcgccgaccgcgccaaccccaacgcaccgcacggcctgctgatgctgcgctgggatgaggaagatccctcacatattcaacaacgcgaggcgttcatcgccacgctgacgcagagccttgaagcgccgggcgctgcgaaaaacaccactggaacggcaccatgaccaacatccataacgacaagatcctcatcctcgatttcggcgcgcagtacacgcagctgatcgcccgccgcatccgcgagctgggcgtctactgcgaaatctgggcgtgggaccacaacccggccgagatcgccgcgttcggcgccaagggcatcatcctgtccggtggcccggaatcgaccacgctgccgggtgcgccggccgcgccgcaggaagtgttcgacagcggcctgccgatcttcggcatctgctacggcatgcagaccctggccgcgcagctgggcggtgccaccgaagcggctgaccagcgcgagttcggccacgccgaagtgaacgtgatcaaccccgatgcactgttcaagggcctgagcgaccacggcggcgagccgaagctgaatgtctggatgagccacggcgaccacgtctccgttgcaccgccgggcttcaccatcaccgccaccaccgaccgcattccggtggccgccatggccaacgaagaaaagcgctggtatggcgtgcagttccacccggaagtgacccacaccctgcagggccaggcgctgctgcgccgcttcgtggtggacgtgtgcggctgccagactctgtggaccgccgccaacatcatcgacgaccagatcgcccgcgtgcgcgaacaggtgggcgatgacgaagtgatcctaggcctgtccggcggcgtcgattcgtccgtggtggccgcgctgctgcacaaggccatcggcgaaaagctgacctgcgtgttcgtggataccggcctgctgcgctggcaggaaggcgaccaggtgatggcgatgtttgccgagcacatgggcgtgaaggtggtgcgggtgaatgccgccgaccgttacttcgccgcgctggaaggcgtgagcgacccggaagccaagcgcaagatcatcggcaacctgttcgttgagatcttcgatgaagagtcgaacaagctgagcaacgccaagtggctggcgcagggcaccatctacccggacgtgatcgagtcggccggcagcaagaccggcaaggcgcatgtgatcaagagccaccacaacgtcggcggcctgccggagcacatgaagctgggcctggtggagccgctgcgcgagctgttcaaggacgaagtgcgccgcctgggcgttgagctgggcctgccgcgcaccatggtctaccgccatccgttcccgggcccgggcctgggcgtgcgtatcctgggcgaagtgaagcgcgaatacgccgaactgctggccaaggccgatgccatcttcattgatgagctgcgcaaggcggatctgtacgacaagaccagccaggcgtttgccgtgttcctgccggtgaagtcggtgggcgtggtgggtgacgcgcgtgcttatgagtgggtgattgcgctgcgagccgtggagacgatcgacttcatgacggcgcattgggcgcatctgccgtatgagttcctggggacggtgagcaaccggatcatcaatgagctgcggggggtttcaagggttgtctatgacatctcggggaagccgccggctactattgagtgggaatgagttgaaagaacgagggcgccgagaggcgccctctttttcacctgagatcgccgctgttcgccgcaaaatgcgagcgattgatacaatggtcctgagcggggccaatgctgttcagagggtttttgctgagctttggataatttggggaagggaatgaataggactgaagcacagacacgagccgacttgatcgatcagcaactcgcgttgtcaggctggaacgtcaaagacccgactcaagttatcgaagaattcgacatcatcactgtgccaacagagggtgtggccgaaccatgcaccccatatcagggccatcagttcagcgactacgtcttgctgggcaaagacggtaggccgctggccgtgatcgaggccaaaaaaaccttccgagatgccgcgcttggtcgtgagcaagccaagcagtactgctacaacattcagaagcaactgggcagcgaactgccattctgcttctacaccaacggtctcgagaccttcttctgggatctggaaaatgcaccgccccgcaaggttgtcggctttcctacccgcgatgatctggagcggtttgcctacatccgtcgcaatcgcaagccgctgacgcaggaattcatcaacacttcgattgccggacgtgattaccagatccgcgcgatacgctcggtgctcgaaggcatcgaacagaagaagcgcgatttcttactggtgatggccaccggcaccggcaagacccgcacctgcatcgccatggtcgatgccttgatgcgggctggtcatgcagaaaaagtgctgttcctcgtggaccgtatagccttgcgtgaacaggcactggccgccttcaaggagcacatgcccaacgagccgcgctggcccaatgtgggtgaaaagctgatcgcggcggatcgtcgtgtgtatgttgccacctacccgacgatgctcaacattatcagggatgaggcacagaacctgtcgccgcacttcttcgatttcatcgtcgtcgatgaaagccatcgctccatctacaacacctttggcgaagtgctggattacttcaagaccatcacgctgggtctcacggccacgccgaccgacatcatcgatcacaacaccttccagctatttcattgcgacgatggcgttcccacgtttgcctacacctatgaagaagccgtgaacaacgtgcccccctatctctgcaacttccaggtcatgaagattcagaccaagttccagatggagggcagcagcaagcgcaccatttcgctggaagaccagaagaagctgatcctccagggtaaggaagttgaagacatcaacttcgagggcactcagcttgaaaggcaggtgatcaacaagggcaccaacaccctgatcgtccgcgaattcatggaagaagccatcaaggacgctaacggcgtgctgccaggcaagaccatcttcttttgcgccaccaaggcccatgcccggcgcatggaagaaatcttcgacaagctctacccccagtaccacggtgagcttgcaaaggtcctggtgtcggatgacccgcgcgtttacggcaaaggtgggcttctcgatcaattcaccaacaacgacatgcctcgcatcgccatcagcgtggacatgctcgacactggcatcgatgtgcgcgaaatcgtcaacctcgtgttcgccaagccggtctattcgtacaccaagttctggcagatggtcgggcgcggcacacgcctgctggaaaccagcaaacccaagccctggtgccttgagaaggatgtgttcatgatcctcgactgctgggacaacttcgaatacttcaagctcaaccccaagggcaaggagcttaaaccgcagttgccgctcccggtgcggctggtgggcctgcgcctcgacaagattgaaaaagccaatgacagcggtaatgctgacatcgccacacgtgaagtcgccaagctccgccagcagattgccgcgttacctaaggagtcggtggtgatcaaggaagccgccgctgcgctggcgcggctggacgacgacaacttctggatcagcctcagccacgaccggctggagttcttgcgcgctgaaatcaagccgctgttccggaccgtgtccgaggctgacttcaaggccatgcgcttcgagcgcaacctgctggagtactcgctggccgttttgagcgaagaaaagggacaggccgacacgctcaaggagggcatcgtcgagcagatcagcgaactgccgctctccgtcagctttgtcaagcaggaagaggcgctgatccgcgccgcgcaaaccagccactactgggccaaggcggatgaagacgccttcgacgaactggtcgccaaactcggcccgctgatgaaattccgcgagcagtccaccggccaggaacaaacccacctcaatttagccgatgaactgcacaagaaggaatgggtggagttcggtccagagcacgaggcggtcagcatcacccgctaccgcgaaatggtggaaaatttgatcgccgaactcaccgcgcataacccggtgctgcaaaagatcaagaacggcgagacagtgagcagcgaagaggccaaagaactggccgagctgctgcacgaagaacaccctcacatcaccgaagacctgctgcgtcaggtttacaagaaccgcaaggcgcgcttcatccagttcatccgccacatcctgggtattgaagtgctcaagagcttcccggacgaggtcagcaccgcctttgaccaattcatccgcgcccacaccacgctcagtagccggcagatggaattcctcaatctgctgaagggcttcatcatcgagcgcgaaaaggtggagaagaaagacctgatcaccgccccctttaccgtcattcatccccaaggcatccgtggcgtgttcagcccactagaaatcgacgagatcctgcagctggccgaacggttggctgcctaaatagcagagcacaccatgcttcaaaacaatcccgaactcaaaagcaagatcgaccagctctggaacaagttctggagcggcggcatcagcaacccgctcaccgccatcgagcagatcacctacctgctgttcatgaaacggctggatgagttggaccagaagcgccaagccgatgccgagtggaccggcgacaactacatctccaagttcacgggtacatggattccgcccgaataccgcagccagccggagcccgagaaattcgccatcgagaagcgcagcctgcgctggagcgaattcaagcgcatgcaggccgaagagatgctgcaacacgtgcagggcaaggtgttccccttcctcaaagacctgaacggcgctgaatccaacttcacccaccacatgaagaacgcggtcttcatcatccccaaacccgccctgctggtggaagcggtgaagaccatcgacgatatcttcgaggtgatggagaaggactcgaaggagaaaggccaagccttccaggacatccagggcgatgtctacgagttcctgctgtcggagatcgccaccgccggtaagaacggccagttccgaaccccgcgccacatcatcaagctgatggccgatctggtgcagccgcaactgggccacaagattgcagatcctgcctgcggttcaggcggctttctgctcggcgcataccagttcatcgtcaccgaactggcaaaaaaagctggcgtccaagacctcaagcccgatgaagacggcttcactcgcacctcggtggccgctgcgctcaccgaaaaggcgcaggccattctttccagctcgctatggggctacgacatcgaccagaccatggtgcgcctggggctgatgaatctgatgatgcatggcatcgacgagccgcacatcgactacaaggacaccctcagcaaaggctacaccgaggaagctaaatacgacattgtgatggccaacccgccctttaccggcagcatcgataagggcgacatcaacgagagcctcacgctcggcaccacaaagaccgagctgctgtttgtcgagaacatctaccgcctgctgaagaaggggggcaccgcctgcgtcattgttccacagggcgtattgttcggcaccggcggtgccttcaagacgctgcgccagatgctggtggagcgctgcgacctcaaggccgtgatcaccctgcccagtggcgtattcaaaccctatgccggggtcagcaccgccattctgctgttcacaaaggtctgggggccgaaagacaaggtgagcaaacccgccaccaaacacgtttggttttacgaaatggtcgctgacggctattcgctggacgacaagcgcagcaagcagaaaacgcctgatggaaaggacagctggggcgacctgcaagacatcgttggcaaatatcacacccgcgatgccgccagcgacaccgaccgcaccgccaaatgcttcgtggtgccgcgcagtgagattgccgacgagaagaacaactacgacctgtcgctctcacgctacaagcaggatgtccttgaagaagtgcaccacgatgcgccgggcgtgattctggatcggcttattcaggccgaggtgggcgatgtggatgaagcggaactcgccaaggtgcaaagcggcatcgtgcgcgagttgctggagttgaaggggatggtgggatgaggcaggaaaggttgtccaagcttttggatatctccattggcagaacaccgtcgagaaacgagtctagctattggggcaaggggcatcgctgggtttcaattcgcgatttgagctcgaaagtcgttacagagacaaaagagcaaatcacggatcgtgctgtaacagacacccgatgcaaagtcgtcaagaaggggactttgcttttcagcttcaaactaaccatcggcaagatggcatttgctggttgtgatctcttcacaaacgaagcgattgcggcctttgcaatcaaagatgagaaaaagcttcacccagaatttctctactacgcattgcggtcggcaacctatggcggtgcaaaccaggccgtgatgggcaagacgctcaattcaaaatcactggccgaaattgaaattccagtcccgcccctcgacgaccaaatccgcattgcccatctgctaggcaaagtcgaaggtttgatcgcccaacgcaaaaaacacctgcaacaactcgacgacctgctcaagagcgtgtttctggagatgtttggtgatccagtacgaaatgagaaaggttgggacaatcccgcattaacggctttcggcgagatttcgacgggtaatacgcctcccagaagtgagtcggcaaattacgatagtgatttcattgagtggatcaagactgacaacattacagacgatgatattttcgcaacaccctctgccgagcatctttctcagattggcgcgagaaaggcaagaacagtaagtggcggtgcgctgcttgtggcctgcatcgccggcagcttcgaatcaatcgggcgcgcagcattaacagatagagtagtgtccttcaaccagcagataaatgcaatccagcctggaaaggatgtcaatcctttgtacttgtatggtctgtttaagttaactcgtagatatatacagagtcatgcgacgaaggggatgaagaagattctgacaaagggcgcttttgagaagatcacgatgatcaagcctcccttcgagatgcagaaccgattcgcggtcgttgttgaaaaaatagaaggtattaagtccagatacaaacaatgcctcgtcgatctggaaaccttctacggcgcactaagtcagcaggccttcaagggggagctggatctgtcccgcgtgcctattcccgcccagcttgtcgcgcccgtttcccttggagatcaagtcaccgtgccagaacctgttgtgcagaccgtgcctgctattcatttgcccgataccggaaacttgctggcagcgttggaaaattccgaggcccgtaaagcattgatcgaagaatggctggaagcctatcgccaacaactggggggtgcgtcattttcggtgcaagattttatggtggcggcgagtgatcgactcacagaatggctgcaggctgtggttgaagacaaagctgtcgctgatgagcataggaaccgcttagccgaattctacccgagcaatgatgttggacttgacgtaagcgactatgaacacataaaaaaatgggcattcaaggcgctggcggctggcgccctgacgcaggagggcagtaaagtcggaaaccacatcgtactcaaggctgttcagtcatgaaactgcttcgcctcaagatcactgacccggcaggctttcgtagcctaccctgtggttttgaacatcacttccgcactgagtggagcttgcaggaagaactggcccagcccgaaggttttgcacccttcgtgtgcgccggccccaacggcagcggcaagtccaatctgctcgaagcgttggcagcgatcttctttcagttggaggtgcagcgagtgcgtcgtaattttctgcccgaggtcttccagtacgatcccgacgacaatccgaacggcatacaggagcatgaaggccatcccaacgcttatgaactggaatacctgatcaagttgccgaaggaacaccggtcttccgatagtccgcagttcgcccacgtggtcgtgatcaaggagccggacaagtcgccgtggttgcgctgggagaacaacgaggcatttcctgtcgagggttttgctttcagcacattgactgatgaagagcgtgacctgttattgccgcagtacgtgcttggctattcctccggcgagaacgagattctcagcctgccgttcttcaagatgcgttttgtccagttcgatgagtactggaattctctggcccgacagctcccttatcccggccgtcctgaaacgcggctggcctatctggacagtggcttcagtcaagctattctgttgtgcaatcttttgcttcaggatgaagccgccctccagcccttccgcgaggatgttggcatagaggtgctgcgcgagttccgcattgtcttgcgccgcagcatcccggccacaagccaacaagtttctgcctttacttcgggtgagtacgccttgcccaccgaaacgcaggatggtcgttttacagataccaacgtggtttatcttgatccggagaccggagattaccgactcaatctgcttcaaggactagaggccaatggcgatgagcgtactgaacgcacagccattgtcgaaaagctcaagcgctgtgccacgttgcatttctacgatgaggcttccggcacgctgatcctggattaccggataaatgaggtgaccaggcaagccttccgcgccaatttcgatgatccggcaggccctgcactcgctttgtttcaggccttgcaggttctgctgacgctcaatctgtatagcgtcagcgataccatcaaggccgaactgtaccgctccaccagccactacgtcagtgagacgataccgacgctggcctccgatcaacgcatcatgcgcttcaagaatttttacttcacaaagcagggagtaaagaagccgatgctgctcaaagatctgtcggacggcgaataccagatgctgcacagcctcgggctgtgcctgctgtttcgcaagaccaacagcctgttcctgctcgatgagccggagacccacttcaacccgcactggcgcgccagcttcattacccgcctgcgtcaatgcttgcccgatgtggagggtgcgggacaagaaatgctggttaccacccacacgcccttccttatctccgacagcaagtcggagaaggtgttggtgttcgccaaggacaaagccagcggtaaggttagtatcagtaagccgaactacaacacgctgggtgcctcgatcaacaagatcaccatgaacaccttcggcaagcgcgaaaccatcggcggtcatgctcaggccttgttggaggcattgcgtgcccgctttgaacagggcagcgaagacagggaatcgttgatcacggagattcaccagcaactcggtgattcggtggagaaggtgctgctgatcaaggccattctcgatggcaatcagtcagcccttgaggaggggaaggactaatgctgttcccgtatacctacgtgccacaccagatggaaaggatgcatgcgttcatcgacttcatttttcatgaggtttggtgtaaagcgccggcgggtggcgattacagtcttgatctatttgttgcaaaccctgagctgcatgaagtgatgactgcatttcattatgatgacagcaagggtgcagagtttttctctagtcatgtggagcgcatctacggactgttctcggctctctccgaaacgcagattacccaatttcgcgagtggcaccgagggaataatgacttagagagggtgtgcgccaatgatccggtggtacagctcgcccgctatagtgacatcgctgccaatcacaaggatcttgccgtgcagctcggcgcattttttaagggcctttattcgcaatcgctacttggtctcgcggcattgcgcgccaagattggtgatattgacagtcactatcaagcgttcatgcaggtcaatagggtcgggaaatgcccgttctgtggtctcaatgatctattaggggaattccatagcaagcgcgaggcctacgaccactacttgcctaaggctttgtatccgttcaactcaatcaattttcggaatctcgtcccatcctgtcaccactgcaatagtagctacaagaccagcaaaaatcccgcccacaaatttaaggatcccactagggcagttgagcgtcgtgcgttcttctacccttatagacttgccgcgcaaccgatcgaactacaggtcaccttgctaaactcagacatagctaagctgactccctcggatatctcgctgcaatttggcccgtccgatgttgctgaagagatcgacgcgtggaaggatgtgtacggcatcgaagagcgctacaaggcaaaactctgtggtgagaatgacggcaagtattggctgatacaggtgctcgacgaatgcagtgcttatgacaagaaccccgtggacatcttgaccatgcgtgcccggcagaccctgagtcgaccattcgccgattgcaattttctcagaatgccctttctcgatgcctgccagcagatcggtgttctttgacgatcatgcgtgttcgtttgtaatcaggtcaccaatcctggtttgatctacgccaccgcagggtgaagctgagttgattgtggccctgtggataccgtgtgtcgtagacggtttcatagcctctctgtccaaaatttaaatccttctaaggccctaggccatggagggatcaacgttgatcgcgatcaatccgtctagctgcgtggacttgctcaaatcttccatgacgtcgggggcggcagagaaagatggggcgtacgaggagggtcatctaggcgagagtccgcaattattgaggtcttacctcatgacaagcccattcaaccaacccccggcaagccagaaacaacccatcaaccaccccctcattcaagtgccgttccgggtccgctgccacccggcagcggtctgctgcatgtagcaactccaagacggtcagcgcgcccaccatcgcgcgctcgctcctggccaggctcacgcggcggccgggtgatacatcggtttctggccaaaggtgcccatccgccccctcgcagccgcgcatgcgtttgaggatgccgagcagggagttcagatcgggcaggggagtgtcgtcgttgatgggttcaacaacggtgtacgaggagaaggtgtcggattcgttcatggcgtcggcttccgtggctgtgcttaacagcgccaccgcgaagaggtggcggacgatgcgtggctgcaaaccggaagaagcaatgtcataaaccggtgggcccgaaagcccccacgcaccgcccgccagaaaggccgacggattgcccgccggcaccggttaaggacggtgccgacgggcaagcgcaaactacagacatcgctttcttcgggtttgcagacccgagccatccgttttcggtggcgcgccatggtgttaacgccgtagcttcgaatgccaatagaaattcgtgaaggaatcgcggaatccgagagcgaagaactattgttgcacgcaccattcgtgcagcgcgcgacaccgccggacgcattcgcgcagctgttctgctgatagcgaatcaacgtggcgcaatcgcccacgccacatgggaatagcgcgacagcctgctttgcaacagttcttaatccggctctccaagtaacggcgtcgaatcagccacataccccgaaaatcggttcaaagccgacaccgccagcgaacctcgcgacttcaaccagcgccatcctcagccgcgctcgcattccccaccagcaactcaatcatcgcccttgccgccgccgactgccgccgatgcggcgcataaatcaccgagaacggtctcgatcgcccccgcagctgcggcagcacttccaccaattgcccgcgctgcagccgctcgcgcacaatgaattcatagctctggcagatgccgatgccctgttcggccagcgacaccacgcccagcacatcgtcggaggtctcgatggatgaacgcggcagccactccacgtcgcgcccatcgtcgcggaagatccaaggcgccagccgcccggtgcgcggcatcacaaacggcaggcacaggtgctgctgcaggtcgtccagcgtctgcggcgtcccccggcgttgcaggtactccggcgaagccaccagcaccaaaggcgcatcttccaacttgcgccccaccagcccgctgtccggcagctggcccaggcggatggccaggtcgaagccttcggccaccaggtccacgttgcggttggtgatgttcagttccacctgcacctgcgggtactgcagcgcaaagcgcgccagcacgggtggcagccggtagtggccataggtggtgggcacgctcaggcgcacgcggccggccagcgcaccgtcctgggccagtacgtcgcgctcggcgtcgtccagcaggccgaaggcggtgcgcacctgttccagatagagccgcccggcgtcggtcaggcccacgcggcgggtggttcgctgcagcagctgccggcccagccgtgcttccaggcgggtgaccgcgcggctcagcaccgagggtgtggtggacagcgccacggcgccggcggtgaacgagccgtgctcgaccaccgccaggaacacctctacatcgcccagatagtcgaacttgcggctcatttggctctccggagaacagatgttttgcagtggggccaatttatcgccgctggggcgatgaataaagtggcggccattccccgataggagtccccatgaacctgatgacccggctggccgcagcgctggccctgaccctggccgccagcggcgcgcatgctgccaacgtgctggtggtgctgtccgacgaaaaccacctggacctgaaggacggcaaggtgctgtccaccggcttctatctcaacgagctgatgcagccggtaaagctgctgctggacgcgggccacgaggtgaccttcgccacgccgcaggggcgggcgccgacggtggatgcgtcctcggtgacgccggcgtacttcggcaacgatgccgcgcagctgagactacacaaggacctgctggagaagctggcgctgacctcgccgacggcctcgccggtggtcagcctggcgcgcattgagcagcaaggctacgcgcgtttcgatgcggtctatattcccggtggccacgcgccgatgcaggacctgctgaagagcccggcgctgggccggctgctggccgacttccaccagcgcaacaagaccaccgcgctggtctgccacgggccgatcgcgctgctgtccacgctgccggatgcggcgggtttcgtggcaaagctggaaacgggtgcgatgccggccacgccgaagtggatctacagcggctacgagatgacggtgatcagcaaccaggaggaagagcaggccaagccgctgctgggcggcggtgagatgaagttctacccgcagaccgcgctgcagcgggcgggggcgacattcagcagcaatgccacgccgtggacgggccatgtggtggtggaccgcgagctgattaccgggcagaacccggcttctgcgctggaggtggggcagcggttggtggagcggttgaagtaaggcggggctgcacagcaggttgccagccttggggccgaggggccagcgcctcggcctgtctatggaagtgccaccgtggtcggcagagagggcatcagcccttcgcgagcgctgctcctgacagatcttcaatctgggaaagggcgtgacgcgtcgcggtccaatcgccggcgtgcctgatcgccacgcctccggccgctgtccaggcatcacagttcgcttcgaaatcgtcgatcagaacatcgcccggctggtgcatgaaaagaggcttgtgcctgccgccgagtaccggcaacaccaggcaggttgctgacaggtgttcgcggacccactgtcgcttctgcatcgcggcgagcggatagttcgatttcgggcaggcagtgagaatcaccgggttcaagtggtggatgctgtggaagaactccactgcaccgtgcatcggcggtaggtcgcggaagaacgacgggtggttgttgatgtgcccccacatttcatcgtcggcaagcaagcgatggtccaggccaaacagggcgggaaatgccgcgtcgaagtcggccatgacgccatcaagatctacgtagatggtgcgtctggatgcactcgatccaccggtgtgccagttcgcgagcgggtccatcatcggtattgacttcacatcatcagcgttcatttgcgcgttctcctttcaagagtgggctttcttcttcatcggttccccagtagcgggacaaagtgcttggcgattgcgacagacatggcagcaatcgcgatgccgctggcgtcggtcaagggcgaaagagtgatggcctgcaaccccaccaatgcggaacgccagagtgcctcttgagtccatcaggcgctgctgcagcgggacggtgcaccgcgccgtaacaacacaatatgggcgccaccaaccagaattgaaactgagatgggcatcgcctcacggcgacgccgcccggcagatgccgtaatcggcacgcttgaaacgcggtatatatcgccgcgattcttcagaggcatgccgagtggctgctccggccgttgcccaagacgcatggccccagccactggctcatttcgcaaaccaaggagcaatctggcgcgctggtgattggataatcccaacgcgctacggaaaggccgaacggagatatgcctgtggcgctcgttccagactgatccaggaacgtcactgaacatggatgttcaggcgcactcaatatatcacgccgaccagcgccagcggcttgaacgcgctcgatctccagcagtttgattgggcagggcaaggccggcatggcaccatgatgggctggcctcgtccttccggccggggccgttttcccagggaagcccaccaacacgacatgcgaacgtccttcttcattctctccgccctgtgccttggcctgctgcctggctgtgccagtggcccggaggagcacgcctcaagccgcgagatcaccagtgcgttcgtggccgacgacggccagctgtacctgctgccgcgctatgacgagccgatgcgcttcaatgccgcgccgttccgcgagtaccgggcgctgatggacagcccgctgcgcgaggctgtggcctgcgcgcagatgtacttccatgaggattggcgcgacccggccaacaaggccaaggtgcacggcagctatgcgctgctgctgcggccggagcaggtgacggcggagcaggccgcgcagttcaagctggagcggattgaggtcccctcgcgtgaggccaaggccgtggaggagcgtgcgcgctactacctgccgatggaccggacccgttacgcgctggcgtttgaccgggcctgcaatctttccaagaagggcggcagctattacagcgcgctgttcgagggcgacggcgagcgggtgcagttgccggatgctgcggcactggcggagaaggggaagctggcacagccgatcaatgcgcgtgcgcagcggatcctgccggagagggaggacaagccgggtgcgggttcggcggcgggcaaggtgctcggcgcggcgctgatccctgtggcagtgccggtgtttgtgctgagcctgccgttcctggggccggatcattggaagtgaaaaggcgttgggggagagtcatccacgcatggcgtggattgggcatcgcctgaaagttcatcctggagatctgtgtgccaagcacgctggaaactgttttgaagactgcaggcttcattgtcgttgcggcgcttccgctggtgatcctctggttcacccttcggcgaatggcagcaaccgctcgctcgtccgtgaaatcggggctacgtttgcatgccccgcgccggatttccggcacgtccatgaccttggtgatggtggatggcaaagaggatcgcgagcactatttctttgatgcgcagtccttttacctgcgacgtgggccggtgcccaccgccgttccgctttcgcagatcacctcagtcacacgaacgtccgacaagatctacgggcgctatgtctggcaggtgtgcttcagcaaagcatcgggcagaaagtgcgtgacgttcaccaacaacctgacgctgttcaaccgggatttcctgctgttcctggaggcggtgcggaaggccaatccgctggcgaccgttgatcgggtgggcatcctcttctagagcgtgtttgaagttcggtatgaacagtgtcactgcaatggcatcacagcgcgcagcccctgtgtaaccgatgtaatcgatgagaaatgggcgtttgttgcgcggtatctgataccgaagcattctcatgcgtggcagtgcaagcatgatctgcgatgaacacgcaaagcccgtaacatggaacgaggtccgctcgttcctgcgcgcgacgcaaagcgtgggccttggtacctgtgacgaagacgcatttgagataattgtcgagacgacttacgtttacggcatgcggtcaatctctgcggagtagttcatgatgatgtgccgatccacgctggacgtctccctgattcatgcctatgcgcttcctctcggcatatgcgtggcagcagccgtggttctgatcgcagtatggctggcaccccgctctggcggggtgccagccaggaatattgcgctcggctcggcgctggccgttgttgtcgtagttgcctttggcctcgtatatcaagcgcggacagcgtacatcgccattacagatggccagctgattgggtcagcagcgtttgtccgactgcagctcccgctttccagtgtcgcgtggcaggacgcttccgatgcttcaaggatcacgctgcctcaccggcaacttgggaccagcaccgggggcgttgaacttggcaagttcggcatgcagaacggtcgcaacgtcttcgtgctgcgcacggatcgtagctctgttctcgtcacagccagaggggatattgacttgattctggaccggcgtctttacgaacagctcaaagcatgcttggatcaggtgagtgagaccggcggccatcgaggaacactgcaatgatcagcaggaagtactggtttaccaggaagaagtacggatggggctgggggatgccgtgcgcgtggcaaggctggcttgtgtacgcagtcgcattcggcttgctactagcgggtccgtttctgttctctccatttcgcgagcccatcgcgtttcagctctacacgtgggccgtagtgttggtccttgtccttatctgctggatgaaaggcgctccgcccggttggaggtggggggagtagaacggccgcagaagctatttccggacgtgttcgatccgctgggcaaagcatggatgcattgcccttgtgggagtcggacagtatcgccagcaggccacggctgcgccccctctgaggcgtaccgtccgttttgaaagaacgctggacacttccctcggcggctacccaacgcgttctaaccgttaattgaccaatgtagcgtcgctgaagcggggcgccggcaaagctacactgaccacctacgcccaatggaagctcacccatgttcagtggaaaggttgcggtggttaccggctccaccagtggtatcggtcttggcattgccaccgcgctggccgggcaaggggccgacatcgtgttgaatggcttcggcgatgcggcggccatcgaacgcgcccgtgcccgcctggaagccgagttcggcgtacgggtggtgcatgacggtgccgacctgtccaagggcgaggcggtgcgcgggatgatcgatcgcgccgttgcgacgatggggcgcatcgacatcctggtaaacaacgcgggcatccagcacaccgcgtcgatcgaggaattcccggtcgaaaagtgggatgcgattctggcgctgaatctctcggcggtgttccatgcaacggcggcggccttgccgcacatgaagcagcagggcgccggccgcatcatcaacattgcgtcggtgcacgggttggtgggctcggtgaacaagtcggcctacgtggcggccaagcatggagtggtgggcttcaccaaggtgaccgcgctggagaatgcggggaccggcattaccgccaatgcgatctgcccgggctgggtgcggacggcgctggtcgagcagcagatcaccgcgttggccgagcgcgaaggcacggatcaggagaccgccgcgcgtgcgctgctggctgaaaagcagccgtcgttacagttcgtgacgcctgagcagctgggacaaatggtggtgttcctggcctcggacgcggcggcgcagattaccggcacggcgctgccggtggatgggggctggacggcgcgctagctggctggctgtgctttacgctgcagcatgggcaatgccaccagcgtggcgagaatggtgaacagcaccagcgacgagcctaccgtgccgaagcccaagccgcccttttccagcggcttggtgagcaagtcgccgaaagtggcgccgaacgggcgggtgagcacgaaggcgctccagaacaggatgacccggttgatgcccttgatgcggctggccaatgcggtaagcgcgatgaggctgccgatcagcagtgcgccgccggtgaagcccagcccggaatcgtcggcgaggaaatcacccagcgcggtgccgagcgtgttggagaacagcacggcggtccagtagaagccttcggcgcggcgcgatgcgatgttgctgaccgagatcgacttttccgacagccgccaagccagcagcaccagcgccaggcagccggccagcagactggcgccggtggcgtagcccaggccgagcgtgcggtcgatcaggtcggacagggtggtgccggcagtgctggtcgccagcaccaccgaccagaacagcaccggatggaagcgccgcgccgacagttgcaggcccagcaggccggcgaagatcgccagcaggatggccgagctggccacgtagcccaggttgagcgtcatcgacagcagatcgcccgcagtctcgccgagggtggtggcggcgatcttcatcacccagaaaccgagggtgaccgccgccactttgctgtgcagggaatctgcgtctgaagcgcgcatcgaacgtcgcctggggagcccgcgggtgatgctgtggcgggcggcgtcggagtgcagtcggaaccaggtttggcgagggtgagcgtgggggcggcgttcagccggcgctggcgggggccgaaaggcgcgccagcagggcgccccagtcggccacgaagcagccgtcgcggccgcggttgcattcggtgatccacgcgtccagcgattcgctccgtgcgcggtagccgcagacatcgcccaggacggcgaagtgcaggcggtagttcaccagcatctgcagccattgcccggccatgccggagcgcagctcgaagaagtctgccgaaaggcgctgcaccggaacggcgatccactcggcctggtgcccaagggcatcgccgaccaggtcgcgcaggccgttggcatcgagtgcggggccctgcggcgcgatgcgcaggaggcgggtggtgccgaagtgttcaatggaatcattcatgctggaggttctgcagttgacgcagccgggcgaggatgtcttcgcgcaggccggggatgtagtgataggcgtctgcgagcagggtgacgtccgccgtcgggacgagccgcttcatgcgttcggcggcggcaggggtgtcgatgagggcatcacgcgcgcccatgacaagggctgccggcggatgcaacgtagccaggcgctcgtcgctgatgcggggaatgcgtagcggacgtggccgaacctcggcacggatcaatgccagcaggtcgagcagcggctgcgcacgtgcaggtgcatgcagtggcgcgggacccatgaccgcgcggcgcaggcgctcgcgtccccatcggccaagcagcaacagtggcagcgccttgagcaggaatgcacgctggcgcccgatacccgaggggctgaccaggaccagtgcgttgacccgggcaggccttcgcagcgcgtagtccagtgccaggaagccgccgaacgacaggcccacgaatgctgcgctttccacgccaagtgcgtcgaggacatcatccagccattgcgcatgcgcgtcgctgtccagcgcaggttgcgtgccttcgctgaggcccggttcgccaatgatgtcgacggcatgcacgcggtagtactcgctccagcgttcggcatcgaacatccagctggcggcattgctgagggtgccatgcagcagcaccagggcagggccgtgttccgggccgcagctgaccacaaatgtcgaaccggcgcgggtggcgagatgatgcgattcgtgtggtaccggccagtccgaaagcacctggcgataggcggcaagtacgtgctgcgtgggaatgccgggccgctgccgcttcattcgctgcggtcctgcagcagacgctgcaggctgaccagcagcgccgtggaacctgccaggccaccgatcacgatcagcttgagcacatcgtgctcaggcgaatagatcgtctccatgcgcagcggctcatcgtcggcctcgcggccggtgacgcgcgcatgcagggcacgcaccaggtcggcggcacgtgccgcaccgcatccgggaatatccaccaccgtggtcagctgtgggcgcgcagcggagggctgacgcacggtgccggtgaacacgtcgaggtcttcggcggtgatgcgataggacttgccgatgcgggtcgcgcgcagttggccgctacggatatgccgcaggacggttttggggtgcaggctgagctgctgggcagcctgatcgacggttagcaacgcgggggacataacggaactcgagaaccatgcgctccctattgttccataaaatgcaattttcgggagcgattggggattgcgcggcgacggcgacagcgggccatctgcccggtgccgctcgcgcgggccaaccctcccgacggctacgctggcttggcgaacacatccagccccttgcccgtctccagcagcgacttcaggctggacagcacgatcggccagccctggcggatgccggtatccatgccgctgccgggttccagttcctcatgggtaaccgtcagccgcaccatgtcctggtagggcacgatgtcgaaggtgacgcggctgtaggcagcgggattgttggcctgcgaggcggctgcccaggtgatgaccaggcgcgagggcggggtgctttccaccacttcgccgaccagctcgaccgagcgcgtttcatttgcacgcacgtgctgccagcgcgagccgggcttccagtccgacacgttctcgtggccccagtagcggcgggcgatctcgggccgggtgatggcctcgaacaccttctctggggtggaggcgatatagatcacgtggatgaagcgggttgactctgcagacatcgtcattctccttccagttcgcgtttcaggtcatgcagcaggctcaggcgctgctgctcgaacttgcgtacccagcgttcgtagacttcatgcaggggcaccgggttgatgaagtgcagcttctcgcggccacggcgcacggtactgatcaggttggcgtcttccagcaggcccaggtgctgggtgaccgattgccgggccatgtccaggtgttcgcacagctggcccagcgtctgcccgttgtccttgcagagcagatccagcagcgtccggcgcgtgggatcggccagtgccttgaacaccttgtctgcgtcgcgcaggtggtctaccgccatggggaggtcttcaattccagttgtcgatcctgacgtcgtgtgggttgggctggcccttgccggtttccagcagtgccttcaggctcatcaggaacaccgcccacttggtgctgcagtgggaggtgaactcgacacgttccttccagccttcgtgggtgaacaggacgatgcagtagtcgccttcctgcttcagcgcgaagcgcgcgtgggtgccgatccattcggcggggccggcgaggaaccgccacagcacgagctcgcctggaacaagctgctcaagcttcatctccatggcgccgatttcctggccgttgttggtgaaacggaccttgaccgtgccgccggcttcgcgctcgccgtgcgcgtcttcggcccaccaggcggccacgccttcgggggtggccagcgcctggtacacctggcttgcgggggccttgatgccgaccctgtgtgcgatatccaccattgcaggttcctcgcgatgggctggcaggcgccgcccttgagttgactatatgcaggtaaatgcctgcatgtcaaaccccgccacgaacgcccgggcgtggtagtgccggccgctggccggcatcccggtggcgttgggtgactgcagttgccggccagcggccggcactaccggggcgatggctcagttctccgcgtcctgaagggcggcatgcagtttgtcggtgatccgctgcagtgcggcacgatcatccgcggagagatggtcgagaaaataccggcggacaccggcggcgtgtaccggccgtgccgcgcgcagctgcgcgtgcccttctgtggtcatgcggatcactacgacgttttcgctgtcggtatcgcgttcgatcaggccacggcccgccatgcgggtcagctggtgcgagaggcgcgtcttgtcccattccaggtagtccagcagttcgcgctggcggcggcagcgatccttggactggttcagctccatcagcacgatgaagtcggcccttgagagcccggtgctgcgggtgatgtcctggacgatgcggccggaggtgatttctgccatgcgccggaagccgcgccaggtggcccattcgtcgggtgtgatgctgggggaggtcatggccgaacgttgccgggcaatggttgacatgtcaaccctcgcggcatacggttgacgtatcaactaacctggatcgcgccatgcagcaccctccccgtattgccgtcatcggcgcaggccccgctggcctcaccgctgcgctcatcctgcatcggggcggtcaccccgtgagcgtgtacgagggcgaagcatccgggcagcagcgcacacagggcggcacgctggatctgcacgacgattccgggcaggtggcgctgcagcgcgcgggcctgctggaggccttccgtgcggtggcgcggcatgaggggcaggaagcgcggatgggcgacccgtggtccggggagatcaccaccggcgggttcgggccggaagggagcaaggacaagccggagatcgaccgcggcgacctgcgccagctgctgctggacgcgctgccggcggacacggtgcagtggggccacagcctgaccgcgctggtatctgcacaggcgaacggccacggcctgcgattcgccaacggcgtgcagcgcgaggcggacatcgtgattggtgccgatggtgcgtggtcgaaagtgcgcgcggccttgagtacgtgccagccggtgcccaccggcattaccttcttcgaaggttggatcgcacagcctgctgcggacatcgcagcgatggtcgggcagggcagcctgttctgctttggcggcgaggaggccctgttcgtgcaacgcaacagccgcgatcggctctgcgtgtatgcggcgctgaagcgctcttccgagtggcttgatgcgcagatcgcgcagcacggcatacggacgctggtgacaggctgctataccaggtgggccacgaaccttcggcgcctgctggaggcctgcacggacttcgtgcggcggccgatctacagcctgccagcggatttttgctgggccccgcgcgatggcgtgaccttgatcggcgatgcggcgcatctgatgccgccggtgggcgtgggcgtgaacctggcgatgctggacgcgtcggatgtggcgatggcgttgtgcgcgcggccggatgcgatcagcgcgatgcgcgacgccgaagtgctggtgcgtgaacgcgcccgcgccctgatgccggatgcgatcgaggggttccagcgctggttcactaccggaggggatgctccacgcggttgatgaagcatcgagtctgtacgcacctgcgacactggggacagcagcagattcctggcggcgcgctggaagtcacatggacttccgactgctttggtccggtacaggtggccacgctggggtacgcgctagactggttgaaccggccgatgctccccctgttttccagggttggggagcgtggtatgacaggagcggaacgcatgactgaaaccggaaaggacgccttgaacatccgccgcgccagcgcggccgatgcccccgcagtgttggggctctttgacgaggtgatcgagtggttcgtgtcgatcggcaatgtgcagcaatggggcagcgaaccgtggtcgacgatgccgcgccggattgcccaggtcaccgaggcgtgtgcactgccaggcgcatgggtggcgcagaacgagcagggcgacgtgcgggcgttccttgcactgggcgagtcgatgccctatgtgccggcccccaccgggccggagctgtatgtgcgggttctggtggcctcgcgtgatgtgcgcgtgcgtggcatcggccgccgcctgatggcgtttgccgacgagcaggcgcgcgctgccggtgtcgaccatctgcgtgtggactgctacgccggaggcagcggcgacctggtgcgcttctatgaatcctgcgggtatacgcgcatcgcgccgttcaacgtggacggctggccaggcatgctgctgggaaggacgctctgacgcggctgcgtcattccgtcgcagcctgcgtgcaggaaacgatacatcggttcggcgctagagtaggggcatgacctgcatcggatggctgtgtcattccgctgccggttcctgatgccccccctccaggaaggtgcaacgcatgtattacagcagtggcaactacgaagccttcgcgcgcccgcgcaagccggccggtgtggatggcaagcgcgcctggtttgtgggctcgggcttggcctcgctggccggcgccgcattcctggtgcgcgacgggcgcatggccggtgaacgcatcaccatccttgaacagcagcagattcctggcggcgcgctggatggcctgaaggtgccggagaagggcttcgtgatccgcggcggccgcgagatggaagaccacttcgagtgcctgtgggacctgttccgctcgattccgtcgctggaaatcgaggatgccagcgtgctggacgagttctactggttgaacaaggacgacccgaactattcgctgcagcgtgccaccatcaatcgcggcgaagatgcgcacaccgatggcctgttcacgctgaccgagcaggcccagaaggacatcatcgcgctgttcctggccacccggaaggagatggagaacaagcgcatcgacgaggtgctgggccgcgacttcctggacagcaacttctggctgtactggcgcaccatgttcgcgttcgaggaatggcattcggcgctggagatgaagctgtacctgcatcgcttcatccaccacatcggcggcctgccggatttctcggcgttgaagttcacccggtacaaccagtatgaatcgctggtgctgccgctggtgaagtggttgcaggaccagggcgtggtgttccagtacggcaccgaggtgaccgacgtcgacttcgatctacagccgggccgcaagcaggccacccgcatccactggacgcgcgaaggcgtggccggcggcgtggacctgggggtggatgaccttgttttcatgacgatcggttcgttgaccgaaaactcggataatggcgatcaccacaccgcggcgcgtttgaacgaaggaccggcgccggcctgggacctgtggcgccgcatcgccgcgaaggatgcggcgttcgggcgcccggacgtgttcggcgcacatatcccgcagaccaagtgggaatcggcgacagtgacgacgctggatgcgcgcattccggcttacatccagaagatcgccaagcgcgacccgttcagtggcaaggtagtgaccggcggcatcgtcagcgtgcgcgactcgcgctggctgatgagctggacggtgaaccgccagccgcatttcaagaaccagcccagggaccagatcgtggtctgggtgtactcgctgtttgtggatacgccgggcgactacgtgaaaaagccgatgcaggagtgcaccggcgaggagatcacccgcgagtggctgtaccacctgggcgtgccggtggaagagattgatgcgctggccgcgaccggtgcgaagacggtgccggtgatgatgccgtacatcacggcgttcttcatgccacgccaggccggtgaccgcccggacgtggtgccggacggtgcggtgaacttcgccttcatcggccagtttgccgaatcgaagcagcgcgactgcatcttcaccaccgaatattcggtgcgcacgccgatggaagcggtgtacaccctgctggggatcgagcgcggcgtgccggaggtgttcaattccacgtatgacgtgcgctcgctgctggccgccaccggccgcctgcgcgatggcaaggaactggatgttcccgggcctgcgttcctgcgcaatctgctgatgaacaagctggacaagacccagatcggtggcctgctgcgcgagttcaagctggtgcaggaagactgagcgggcagggggaggccgccgctgagggcatcggcggcctcaagatctcacgctacgccgtcggtcgaacggctcagctgttcccacgcgtcgatgctaccggccatcgatgccagctttgccctcaccagctgcagtgcatcactgcccagcagcaagtggcggggaggagcgtcgctgtcgatgacctgcagcatggcctgcgcagccttcactggatcaccgggctggtggccactcttcgcctcacgcgcgctgcggatgggatcgaacaatgcgtcgtagtcgtcaatgctgcgcggtgcccgcaccatcgagcggcctgcccagccggtgcggaaggaacccggcgcgacggccgtgacgtggataccaaacggcgcgacttccttgtcaagcacttcactgatgccctccagcgcgaacttgctgccgcagtaccacgcgatgcccggcatcgtgatgaaaccgcccatggaggtgatgttgaggatatggccgcggcgccgggcgcgcatgtgcggcagcacggccttgatcagcgcggccggagcgaacacgttcacctcgaattgctgccgcagctcggcgagcgtggattcttcgaggatgccttcgtggccgtagccagcgttgttgaccagcacgtcgatgcttccgatgttggtttcgatatcggcgacgagcgcattgatggcggcggtatcggttacgtccagcaggcgaccgaatgcgcggccgggagcgagcgcttcgagtacctggcggtcggtttcgttgcgcacggtgccgaccacgcggtggccggccagcagggcctgctgggcaagggcgcggccgaatccactgctgacaccggtgatgaggagaaagcgggaagggggcatgagggggcgttcgtggtgggcagggcttgcacgttagttcttgaatgaccggggtcacaggcctaggattcggccattcttgcctattcctctggagtgcctgtgcctgtggtcgattccctgcaacggcaggtgcaggcgcgcatggtcggcctgctgaagacgctggcggtggaggagggctatacgctcacgcgcctgccgggggtgcggttgctgcgatcggaccggccactggcgcgcacgccggtgttgtacgaccccggcatcgtgatcgtctgccagggcgtgaagcgtggctatctgggcgggcaggtctaccagtacgacgcccagcactacctggcagtgtcggtgccggtgccgttcacgatggaaaccgatgcgtcggcccaggcgccgctgctggcgatctacctgcacctggatctgcagctggcggctgatctgctgatcgaactgggtgaacaggagggcaccccggcgacaccggcgcagagcatgatgtccagcccgatgcaggcgccgatgcaggccacggtgctgcgcctgctggaggcactggctgaaccgttggaggctgccgtgctcggccctgcgttggtgcgtgaggtgtacttccgcgtgctgacgggtgcacagggcggcgcaatgcgcgaggcgctggccatgcgcgggcgcttcggcagcatcggcagagtgctgcggacgatccatgccggatatgccaccaccctggacgtggggcaactggccaccgaagcgggcatgagtgtggcgaccttccacgaccacttccgcgcgattaccggcacgtcgccgatgcagtacgtgaagtcgacccgcctgcaccaggcacggttgctgatgctgcggcaggggatgaccgccgaagcggcatcgctggcggtggggtatgccagcccatcgcagttcaaccgtgagttcaagcgcctgttcgcgttgccgccggcggccgaggtcgcgcggatgcggcgcagtttcgcgctgccacctccgccagccgatgcggtgtacgtgtcttcgcattgaggggcaatcgaaggtcacgttgccagcggccggctctgccgggaatgatgcctggcgggtgcagcagagaggggttgacaggatgtctacctactagtaggtttattaccatgaaggaatcgctctcgcccaaggcccaggaaatcctggcccatgcccgtgcgctgctggaagccggtggctacaacggcttcagctacgccgacgtgtcggcgcgggtgaacatcagcaaggccagcatccatcaccacttccccagcaaggcggagctggtgcgcacggtggtcgagctgtaccgggccgaggcgcgcgaaggcctggcgctgctggaccggcagttggccgatccgctgcaggagctcaacgcctatgtggagtactggtccagctgcattgcagggggtacgtcctcgttctgcatctgcgcgatgctggccgccgaagcgccgatgattccggcagagatcgctgaggaagtgcgcggccatttcgaggacctgagcggctggctggcagtgacgctggagaagggcgtttcgatgggccaactgcagttgcagggctcggcggccgatgaggccaaggcgttcatgtcatcggtgcacggcgcgatgctggccgcgcgcggtttcggtgatgcggcgaccttcgcggcactggcgcggttggcgatcgcgcgggtgagcgcggcgtcctgagagatgtgtggtgggcctgcggcgacgcgggccttctttttgagtccagtgcctacctactagtaggttcattttgtccctggagatgtcccatgtcccaccctctgtccacacttggcgtgatccataccgctgtcagcctgatcccggtgttgagtggcctgtatgccttcattcgccatcgcgcaatcgatcccgccacgcgcgcgggcaagctgtacctggtggggctggtgctatcggtggccacctcgttcaccgtgtccagcacgggcgggatcaaccccggccacgcattcggggtgatcgtgctgctggtggcattcggcggcgtgctggccgcgcggctgcgctggctggggcgcgccgcgcgttacctgtcgaccttcgcactgtcgttcagcttcctgctctcgttggtgcccggcgtcaacgaaacgctgacccgcctgccggcagcgcatccgattgcggcggcaccgatggccccggtggtgctgcacacgctgctggcctgcctggtggtgttcgtgatcggctttgccgcgcagtgctggaggctgcgaaaccgtgcctttgcaggacgatcctgagacgccgccggtcaccccggcgcggcaagtgcgcccagcagtgccgccgtttcgatcagtgcagccgagcgcgccggatcgagttgaatgtgccggctgctgaagcagaacgattggcccgctgcaggctcgggggtgttcgcgctcgcgtccggcgtctcgatctccagcacttcgtccacggccagcgccaaggttgcggtgccggcgttgatcagcagcatggccgggctgccaccctcgaatgccggttggccgctcatgcggcgcaggtcgacgacgggtaatggctgcccacggacctccagggtaggcctgccgttgcggtctgcagggccgaatgcctccggaccgcggatttcgaccgcagcctggatgtcgatggcgaacaggacggtacctgcacgcacgacgacgatctcgaacaggtcggcaggcgatgcgcgtgtttccgttgcagggtgggcgggtacgggcatgcgatgggcgtggcgaagacgatgggaaaggagatctggatgatgacgcctggacgcaacgcgcggccgcgtcggcgtgcgcgtgcaaggcgatggttcagtgtctatcaggcggctgcgcgtggcgcgccgacggtgccgacgcgtggaaaatgcggacgcagcaggcggacgagctggtccatgcccggaatggagtggccgaactcgtcccagcgcgcattcaccaggccggacaccacgatctgcccggtctcgatgtgggtcattgcccagtacggaacggcacgcgcgctgatggccatgtccagtaccggcacgacggcagcatgcgagcggctgtcatggatgcggcgcttgactgcttccagggcgtcgggcgggccttcgatgtactggaaaaaccgctgcccgtcgacgatcagcgcaccggtaacgtccacccggcgattgaacgtggcagattgcgagacgatctggtggagggcttgattggacagcccagccgacatgcggctggagtaagcaaatgcatggagcatggaaggggcttcttgtgacgcacgtcactatacgcacgcaagcccggaccgtcgtgaggctttgctcacgccacgcctggctccgcgcactggatcaacagcccaccaaccggtcggcaccgagaccgccgcgatgctggctgcggtactcggtagggctcgcgtcgacctgaccgcggaagtgccgacggaacgattcctgcgaaccaaagccggcctgttctgcaatccactgcagcggccggtcagtggtttccagcagctcgcgcgcgaaagccacgcgctcgcggatcagccagtcgatcggcgacaggccggtggcgtccaggaactgccgctgcagcgtgcgttggctgagcgcggcctgctcggcgaggctgcccagtgagtggggctcgcgcaggttgcggcgcatccattccatcagctttgccaagcgggtgggctcgccgtggggaatggcgcggctgacgcgctggctgcgcccggcatcacgccatggtgccaggaccagccgttcggccaccaggttggccacgcgcgcgccgtaatccttgcgcaccatgtgcagcatcatgtccatgccggtggccgagccggccgaagtgatgatgctgccggtatccacgtacagcgcatcctcgcgcacatcgatgcgtgggaactcgcgtgccagcgcttcggtgaggcgccagtgggtggtggcctggcggccatcgagcagcccggcccaggccagcacgaaggcaccggagcaaatcgaggcgatgcgcgcgccacgtgcgtgggcacggatcagtgcatcgagcagtgcctgcggtgggcgctcgctgggttcgcgccaaccggggatgacgatgatgtcggcgtcatcaaccgcgctgagatcgtagggaagctgcacctgcgcattgccgagcatgcgcagcgcaccgggctcgcccgcgcacagctgggtgcggtaccaggccacgccgagttccggccgcaccggcgcgaacaggccgaccgcgcagccgaattcgaacagcccctggccgtggcaggcgacgatggcaacgagcggcgcggtgggatcggcgggtgggctgggcatggcctgatgctacgggtggcggtgcgtggcgttgcgtgatgcgcgggcatgaggtgatgccgggcgggcatatgggaaccggggtcggatcccttccgcaggaagggctctgaccccgtggtggggaggcgtgcgtggggtcagagccctttcctatggaaagggatccgactccgtgggggaccccgtgcgtgtgcgccgcctaacgtcattaccagcggtcatgtgggtggccggatgttacggctgggtgacgcgatcgcgcctgtcgcaccaggtgaacaggcccttgaatggaagcgtgtttccggcccacccccacgagcccccatgcctgccgcccacgcccctgtcctgagcactctcgctgttctgatcacagccatccttgccgcctcgcccagccatgcggctgaagcagacgcagatcctgctgccaccgccgcgacggccaacgtggccgcgtccacgctggatgcggtggtggtcaccggctcacgcaccagcacgcgcacggtgaagaacagttccacgcccatcgatgtgatctctgcagaggacctcgccgccaccgggcagggcaacctgctggaagcgctgcagcgcagcctgccgtcgctgagccagatcggcggctaccagagcgaccaggagagcctgatccgtggctaccagctgcgcaacctgtcaccgggctacacgctggtgctggtgaacggcaagcgccgcaatgccagcgcttacgtgagtggcgcaaacggtggtggctttccgggccacgcctgggccgacctggcgttgattccggtctcggccatcgaccacgtggaggtgctgcgcgatggtgcgtcggccatctatggctcggacgcgatcaccggcgtggtcaacgtgatcctgaaatcgcaggcgcacggtggcgatgtgtcggtggagagcgggcagagcatcgatggtgatggttcgcgtaccagcgtgcgcgccaatgtcggcctgccgtggggccaggatggcttcgtcaacctgtccggcgagaacacgcggcagcaccacgcgatccgcacccggcgctacatcgatggctacctgagctatccggcagtagatgccaacggcaaccgggtcgcactgcgcccgaacaaccgcttgccggtgggtgcatcgccgaacccggccgaggccaaccgcgatgccgaggccaacaccatcctcagttcgccgtcgtacgcgttgaaggctttcgcagtgaatgcaggccatggcctgggcgagagcgcgcagttctacgccaacgccacggccagtgaccgcaccgcgcaggcgatccagaacttccgcctgccggcgaccatcttcaccacctacaaggcacccggcgtgctgagcgtgtttcccgatggcttcctgccggtgctggagaccaaggaaaagcagtacaccggcactgcgggcgtgaaggggcagatcgcgggctgggattacgacgccagcctgaccggcaaccgcagcacggtgcgcacctatacccgcaattcggtgaactactcgctgccgtatcccggttcgcccactgacttctatgacggcaagctggactaccagcaggggatcgccaacctcgacctgcgccgtggcttcgaggtggcggcctttgcgtcgccgctggaagtgagcgcaggcgccgagtaccagcacgaacagtacgaacgcggggccgggcagtgggagtcgtacaccggcttcggtgcagctgcgttcgtgggctactccaccgccgatgcggtgaaggcgacgcgcaacagcaaggcggtctatgtgggcgcggccagcaacatcacctcgcgctggtatctggatgcagcggcgcgctgggaagatcattccgacttcggcagtgtctccactggccgcctgaccacgcgcttcgacttcaccgacgcgttgggtgtacgcgcgacggtcagcaacggcttccatgcgcccagcctgggcgcacagttctaccaggccacgggcagctgcccgtgcgggaccacgctggtggcgcaggtgtcttcaccggcggcggttgcgctgggtgctacgccgctgaagcccgagaaagccaccaactacagcctgggcgtgacctgggacccgagccctgcattccatctggccgtggatgcgtaccagatcgacatccgtggccagctgggccagtccagccagatcggctacaacgcgcaggatccggcgcgcatcaccgacaacagcggtacggtgctgagcgcggcgcagaagaacaccatcgatgcgctgctgggttccgccggcatcagcatcctgccgggtgatgcgttctacgccagctatttcaccaatgtgggcaatacgcgcacgcgcggtgtcgagctgaccctggaagccaaccaggacactgcgtggggcaagctgcgctggagctacgcggccaacgtcggccgtaccaccatccagaaggtgagcgacattccggcggcgctgcaggggctgccgaacatcaacctgctgaccaagagcagcgaatacgcgctgcgcttccgcacgcccagctacacccaggtagccgggctgggctggcagaacgggcgctggcgctcgaacgtcgatttcacctactacggcccgatcaagcgcctgaacaacggcgtggagtacaagcagccgccggtgctggtgaccaacctgtccggcggcgtggagctgggggcgggctggagcgcggcgctggggatcaacaatgtgttcgacaagcgcacgcgcgaggtgcccgcgtatgcgcgcagtgccaccgatgtggcgagcatcgagacgacgtgggacagcggcgacgtgttgggcaacgtcggggcgtattggtatgggcggatcagttaccggttctgatctggggcagccgagcatggctcggctctacaaaggcgggaagcagccgagcatggctcggctctacaaaggcgggaagcagccgagcatggctcggctctacaaaagacgaagggcggccggaggtagttcggcattatcgaggagcagttcatgtcttctgcattgaaggtggttgcattggtggggtcgccgatcagttcggcgacatcgcgcacgttgctgctggtgcggcatctgctggcgtcgctgcagcaacgcgtgcatgccagcgtggagctggtggagctggcgccgatcgcgcgctcgctgggccagtcgttgtcgcgcgatgaggcggggccggaggtggagcaggcgctgcagagcatcgaggccgcagagctgctggtggtggccgcgccggtctatcgcggctcgtatcccgggttgttcaagcacctggtcgacttcgtcgggctggaggcgctggtggatacgccggtgctgctggcagcgaccggtggcagcgagcgccatgcgctggtgatcgaccaccagttgcggccgttgttcagtttcctgcaggcgcacacgctgccgatcggggtgtatgccacgcctgccgacttcgacggcgagcacatcaacagtgctgccttgcaggcacgcatcgcgctggcagccgagcgtgcggccggccacctggcgacgcaggcgctggcggtagcggcgccgctgcgacgcatcgcctgacgccataaccggcggcgctttgcttatggccacgccgcatctgcatggccggatctgaccgccgattgtcgccaggcgtcgctgccgcagccgccggcatctctagcatcgatatcgaagcggcatcgcattgccgcccccgatgaggacgaccccgtgagtctggacgcaaccgataagcccatcctgttcctgctcgaccgtgagttcgaggacggccagattcccggccagcgcttcttctgccggcacagcctgttgctggaaggtgcactgtcgagcatcgacggccttgatgcgcagctggacgtacgtcgcatcggcttcgcgcggccgcgccgcgaggtgatcgccgagatcggcgagcaggaccagtcgttgcccaagctggtgctgccgcagggcgtacgcagcgacctggccagtggcgcgcaccaggaccggcagtacatctccggtgccgaaccgatcctggccgcactgaacggattgctcggcattcccgtggcccacccctgagcgaggacgcgaccgtgagctatcagatcagcgtgctggacaagagcccggtagccgagggcgcttcgccggagcaggcgctgcgcaacagcctgcagctggcgcagcgcgccgaacagctgggctatcaccgctactggtttgccgagcaccatgccgcaccgacgttggccagccctgcaccggaagtgctggcggcctgggtgctggcgcagacccggcgcatccgcatcggcagtggcggggtgatgctgcgccactacgcgccgtacaaggtggcggagaacttcaacctgctggcggcgctggcgccggggcgcgtcgatctgggcgtgggcaaggcccccggcggcctgccggcctcgactgccgcgctggcagccgggcgtccgccgttcgccgacttcgaccagcaactgcgcgacctggagggttatctggccggcgccgaaagcgaggcgctggcgcggccggttccgcagcaggcggcggagcgtttcctgctcggcgcaagtccacagagcgcaaagcaggcggccgaactgggctggcgcttcgtctacgccgcgcacttcgatggtgacccgaagcacatcgaggccgcgttcgacgcctatcgcagcgtcgcctcgcagccaccgctgctggccacggtggccttcgccgcaccgactgcggaagccgcttcgcgtcatatcggtgcgctgcgcgtctacaagctgcacctcggtcccgggcaggcggtgaacctgcccagcgccgaggcagctgccgagtacgcgcgccaggtgggggtggccgacttccgcatcgaggaaacgcgccccagcgtgctgtccggtgatgcgcagcacgtgcgtgacgaactggatgcgctgcaccggcgtttcggcgtgggcgagttcatcctcgatgcgccggtggccgacctcgacgcacgcctgacatcccttgaactgctgtcgcccgcgccgcgcgcggcggtggcctgacctgcaggagcgtttcccatgagcacgaccccgcgccacattccgttcggcatcatgctgcagggccccggcagccacatgcatgcctggaagcacccgtccaacccggccgatgccagcgtcaacctgcagttctacatcgacatcgcgcgcaccgccgaagacaatggcatcgccttcggcttcgtggccgacggcctgtacatcaacgagaagtcgatcccgcatttcctcaaccgcttcgagccgatctcgctgctgtcggcgctggccacggccacgaagaagatcggcctggccggcacgctgtcgacgtcctacagcgacccattcaccgtcgcccgccagttcgcctcgctggatctgctcagcggcggccgcgccggctggaacgtggtgacgtcgccgttggagggctcgggtcgcaattatggccgcccacatcccgagcatgcactgcgctaccagatcgccgacgagtacctggaggtggtgcaggggctgtgggattcctgggatgacgatgccttcgtgcgcgagcgcgacagcggtacgttcttcgcgccggaaaagttccgccgcctcgaccacaagggccgcttcttccaggtggaaggcccgctcaacatccagcgttcgccacagggccagccggtgatcttccaggccggttcatccgacgatggcatcgcgctggccggcaagtacgccgatgcggtgttcacccattcgccatcgctggaagaaacccgcgcgttcacccagaaggtgaagaactcggcgatcgcgcatggccgcagcggcaacgacgtgaagatcttcccgggcatcggccccatcgttggtcgtaccgcaggggaggctgaagccaagtaccaggcgatcgccgcactggccacgctggaggatgcactggcctacctgggacgcttcttcgaccaccacgatttcagccagtacgatccggacgcgccgttcccggacctgggtgagatcggcagcaactcgttccgttccaccaccgaccgcatcaagcaggatgcgcgggagaaggggctgagcctgcgccaggtggcattggaagcagtgagcccacgaccgaacttcatcggtacgccggagcgcgtggccgatgagctgatccgctggttcgatgccggtgccagcgacggcttcatcctcggttttgcggcacagcgcgaaggcctggacgatttcgtgacccaggtgctgccgatcctgcaggcgcgcggctaccaccagcgcgagctggaagggcagaccctgcgcgagcatctgggcctgccgtacaaggccagccgccattcgaccgatgccgagccggcgcggaaggcggggtagggcaatgagcggagacactgcggcagcaacgggccatgcccggcgggattcccaaacgacgggcgtattgcccgagatcgcggcacgcgccgaggccaccatcgcgatccgccatgacctgcaccgccacccggagctggccttcgaggagcaccgcaccagcgcccgtgtggccgagttgctgcagcagtggggctatgaggtgaccaccggtctcggcggcaccggcgtggtcggcacgttgcagcgtgggcaggggggccgtcggctggggctgcgtgcggacatcgatgccttgccgatccacgaagattcggggctggcctacgccagccagaccgacggcctgatgcatgcctgcggccatgatggtcacaccgccatcctgttgtccgccgcgcattacctggcccatcacggcactatcgacggcaccttgcagctggtgttccagccagccgaggaaaccggctcgggtgcatcgaagatgatcgccgatggcctgttcgagcgcttcccggtggatgcgatctatgggctgcacaactggccgggcgtgccggtgggccacttcggcttcgtcgacggcccggcgatggcgtcggtcgactgggcgcggctgaaggtgatcggcaagggcggccacggtgccgagccgcagggcagcgtggacccgatcctggtcgccgcgcacatcatcactgcattgcagagtgtggtgtcgcgcaatgtcgacccgcggcagatgggcgtggtcaccgtcggttcgatccatggtgggcaggccgccaatgtgattccggacgtggtcgagctgaagctgaccgtgcgcgcctacctgcccgaggtgcgcgacacgctgcgccgccgggtgaccggaattgccgagcagaccgctgccgctttcggggcacgcgccgaaatcgagttcccgcgtggcttccccagcgtgatcaaccacccgcatcagaccgcctacatccgcgacgtggccgtacagggcttcggccacgaacaggtggtgccggagttcgcgccgcgcaccgccagcgaggacttcgctttcctgttgcaggcgcggcccgggagtttcgtgttcgtcggcaacggcgacagcgcgccgttgcacagcccgcgctatgtgttcaacgacgcggccatcgcaccggccgccagcctgtgggcgcgactggccgaagactatctggtgaaggacgtggcatgagcagcaacgaacgcttcctctatacctcggtggatgatccattggcgcggccgctgttcgatggcctggagcaggagtacgacagccgttacgccgacgtgcgccgacgcatcggcggcagcgcccgcgaggagctgcaacgctatccggcgcaggccttcgcggcgccggtaggcgcgttcgtgctgctgctgcgcgatggtgtggcgatctccggcggcgccttcatgccgcaccgcgatccggacaccgccgaattcaaacgcatctggacgctgcccgggctgcgcaggcagggcatcgcgcgtcgcgtgcttcaggaactggaagaccaggcggcgcggcaagggtaccgtcgggtgttcctgaccaccggcttccgccagcctgaagccgtcggcctgtacctcagccacggctataccgcgctgttcgacctgcaggccgacccggaaaccatcgcgcatctgccgttcgagaagcatctacgtgcgccggcgccagtgctttcgccgtcgcagaccgtgttgcacggagcccacgcatgagcacgccttcgactgcgctggatggcattgccgcaccccccgcgccagcaccggcgctgaagatcgtgccggcccggcatccgctgcaggtcttcggcacggtgctggcactggcgctgatcctgatcgggctgcaatccgtgctgggcaatccgcgctggggctggggcacgttcgccgagtggttcttcgcacggcctgtactggaaggcctgggtcgcacgctgctgctgaccgcgctcggtaccggcctcggcttcgcgctgggtaccttgctggcgctggcccgcgtgtccggctcgccgctgctgtcggcggtgtcctggggctatgtatggctgttccgctcgatcccgctgctggtgctgttgctgctgctgaacaacctgggctacctgtacagcaccatcgaactgggcgtgccgttcaccggcatcagcctgttctcgtacccgaccacgcagctgatcggcgtgttcaccgccgcagtgctgggcctcaccttgaatcaggccgcgttctcggccgaagtgatccgcggtggcatcctctcggtcgaccatggccagtacgaggcggcagcggcacttggcctgccgcgtagccgccaggtgcgccgcatcatcctgccgcaggcgatgcgttcgatcctgccggccgcgttcaacgatgtgatcggcctggccaagagcacctcggtggtctacgtgctggcgctgccggagctgttctacaccgtgcaggtgatctaccgccgcaatctggaagtggtgccgctgctgatggtggccacggtctggtacctggtgatccttaccgtgctgtcgctgttgcagcggcgcgtggagcaacgcttcgcgcgcggccagttgcagcgcgagcgctcggtgtcgcgggtgtcatcgcccccgcgtgtgcagggcgaagccgcaccgcgcgtagcaagccgcccgcgtatcgccacccaggttgaagcgggcgagggcgcggcggtgtcgctgcatggcgtaggcaaggtgtttggcgaccagccggtgctggaagacgtgaacctggacctgcgcgccggcagcgtgaccgtgctgatcggcccttcgggcgccggcaagtccacgctgctgcggctgatcaaccacctggaacgcgccgacggcggttacgtgactgtcggcggccagctgatcggctaccgccgcgagggcgacaccctgtacgagctgcccgagcgcgagatccgacgccgccgtgcggaagtgggcatggtgttccagggcttcaacctgttcccgcacctgaccgcgctggagaacatcatcgaggcaccgatcgcggtgcgtggcgtgccgcgcgcgcaggccgagcagcaggcgcgcacgctgctggaacgggtcggcctggccgacaaggccgatgccttcccgcgccagctgtccggtggccagcagcagcgcatcgcaattgcccgcgcgctggcgctgcagcccaaggtgctgctgttcgacgaaccgacgtcggcgctggacccggaactggtggccgaggtgctgagcgtgatcgaggagctggcccgctccggcaccacgctggtgatcgtcacccatgagctgagcttcgcccgccgcgtggccgaccacgtggtgatgatggaccagggccgggtgatcgagcagggcacgcccgaggtgctgttcgaacgcccgcgccagcagcgcaccgccgatttcctggccaagaccctgtaaccgagaaaggaacaccatgagccctgcagcaccgcgtcgtccctcacgcagcaccctgttgatcgtgggcgtgctggtcatcggcatcaccggtatcgtctattcgcgcgtgcggcaggcaccggatgccggcaccgtggccgcgaccagcctggccggtgcgaacacggcggtgttgaaaggcacgttcgatccagaggcgcagtcattgatccccaaggggtatcgcttcgtcacgcccgggtcgttcaccgtggccacccatccagggcagctgccgctggccgactacggggccgacagcaaggacgttgtgggcatcgagcccgacatcgcgcgcctgatcgccgatgcgctgggcctgaagctggtgatcgtgccggtggcctgggccgactggccgctgggtctggaatcaggcaagtacgatgcggtgctgtcgaacgtgacggttaccgaagagcgcaagaagaagttcgatttctccagctaccgtttcgacctgctgggcatctacacgcgcgcagacgggccgatccagaagatcgagaagccggccgatgtggccgggctgaaggtggtggtgggtgccagcaccaaccaggaccagatcctgcggcagtgggaccagcagaacatcgcggcgggattgaaaccggtggagtaccagtacttcgatgacgccgtggtcgggcggctggcggtgatcaccggccgtgccgatgtgtcgttcgagcccaacgccaccggcgcctattccgcacgcgacggtaaggtgcggcgcgtcggcctgttccccggtggctggccgaacgctgcggcgatctcggtgaccacgcgcaagggcagcggcctggctgatgcagtgacgcaggcgctgaacacccagatcgccagtggcacctacgcgcaggcgctgaaacggtggaatgtggccgaggaagccgtgccgcagtcgcagaccaacccgccgggattgccgacgttgcaatgacaccgggcgtggcccggcgcgacctccgcttttgtagagccgagccatgctcggctgctttaccaacgcgcctccagcgttctgaacggtttcgccaggcgcacgccctcggcgtcgaagtcggaaacgctgcgtccgtccacacgcaccgtcttcggcatcgtgcgcgccggccaccagaccttcaccgccgttccgtcgcgcagccctttgccaagccccaccttcagcaccccgtcgcgctgccgcgcctgcatctgcaatgtgccatacgccgtcggcaggcgttccaccgccaatccatcccccgccacccacgagggcggtgtgcccggcagcagcgagagcgcatcatcgtcttcgcgcatcagcatgccgaacagcgtgcggccgtactcggcgccgatccaggtatgcggcatgtcgccgaggtagcgcgggaagcgcagccgtgaatgcactacttcggccagcacctgccattcaagcgggcgccggtcatgaagcaggccctgcagcagctcgtcagccacgtctggctggcccaggtgcacatagctcagcacgttgcggatctcgtacggcgtgtaggcatacagcgcaccgggctggctgcgcttgcgcacgtcttccaggtagcgggcgaaggtggtccgcaacgcatctgccggcaacacgctctgcgcgccggtcgggtccagggcgatcgacacgcccgtggggtcaccatcgccaagatcggccgatgacggaatgaagtcgatgcccttccacgccatcgttgcgcggatcgaggcacgcaatgcgtcgtacagcgctttgtactgctcgcgcgcccaacgggcggtttcgtggtcgcccagcgcctcggccagccacgcgccgtcgtgccaccccttcaggccccaatagtcatcccagtagctgtgggtgggtgatggatagccctcatggctgatcgatggtgcaaggatgcccgcaaagcgttccggggcaggctggtcagccttgtaaccgggcaccagcgtgcgctcgcgcagttcctgcaggaagtgcagcgcggccttcaccttcggcaggtagtcacgcaccgactcgggtccgccatccagccgtgcaacgtcggcgaccagcgccacgtactggccctggctgtcgtactcgatgtccgaaccgaagccggtgttgacgctgccatcgtcattgaggatcggcgagaccaggccgttggcatgtacgccgtgttcgctgtaccaggccaggtagtcgcgcgcgaccttggcctcgcccatgcgcagcagcacggccgaggtggccatgccgtcgcggatgaaggagcggttgtagttgcgcgggccgggctgcatcgccgggccggtctggttgatcagcatgtaggcggcctgcgcgcgcagcatgtccaccagtgatgggtcgggcaggcgcaggccgacctggcccagccgtgcctgccagtccgcggacgcctgcgtggccagtgaatcgaacgccgcattggcatcgcggggaagcgtggccagatccagcgcaggcgcttcgggcagcacgccattggcatccgcggcggcggtgcccaacgggaacgcgaccacgatggcatcgctggttcccggcgccaacgagacgcggtagtccaacgcagccgaggcaagaccctggtcatcatgcgcctgttgcgcggaaggcagttggccggcagcgatgtccgcggtgatttccgtggcgccatccctgccgaacggcgccgcgccggacgcagccactggcgtgagcgagtgcagcagcgtgcggccattgatgcgcacggattgcctgtcgatggccacatcgcggatcggcgacagcccgccgttctgccatggcgggttcatctgcatcgggcgcacgaccaggctgagcgtgccgtcgatccgggtttttccggtgttgtgcaggcgatggcggaggaaggttaccggctggccatcgcgctcgatggcgaacacttcactgcgcagctccaggccgggttgcggtgaccaggtggcggagggcatcggcttccagccatcccgcagcgcgtgctgtatcggctgtcctgccgcgccagcggcgcggccgtcagcacttcgccagatcggctgcaccagtggcgcgcccttgaaggcttccagattgccgtattcgtcgaagatcgacttctgccggcccgcatgcacgcccactgcggtccaataggtctgctgcatctgcaacgacgccgggaacaacgcgcgctgcgcgccgctggcagcgatctggtagcgcttcatcggcgtcatcacggctttcgggccgagcaggcgcaggcgcgcgatctgcggtgcagcgccgtccacgctcaggcggaatgtacgtaacggttgtgctgcagtggcggccagccagctttgtcgatgattggccgcttgtgcatcgtgtgcgaggtcctgccaacggccctgtgcatcctgcacctgcagtcgcgcggcgccgcgcgcgccatcggcccagtcgacgaccaggccagccgttgattgggcccgcggcagcgtgatctcgaacgtatgggatccatttgccccggccggcatcgcgacggtgccgccgccttgccagagcgccgctgcctgcgttgcatcgataccgctgatgcgtgcgctgagcgtgctgtccagtggctccatctcgaagatcgacacgccccaatcggaggtgcgctgcgggctggccagccgcaggtagcgtgccttccgcggcgcgaagtacagcgtttccacgtcgcccagtgaatcggccatcgtgtacgcggtctgccactgcctgccatccagtgaggtctgcagcgaatagccttccggattggagacatcccaggtgaggcgcgcgccggccagcagggtgggcgcgcccagatcgatctggaaccagtggccggggctgaaggcgccgccggtcacggtcttcgggtcgccgtcgatcaggtggccgatcgccatcgccggtacctgctgcgaggaactgctggcctgccattggctgcgcggggggagggtctgtgcctgtgcgctggaggccagggcggccagcagcagggcggcggcagatcgccatgggatagctgagcgggagaccttggagcgttcggcgcgcaacgtcattacagacagcctcgcaggttcgaccggaatcgggcgagcgctacgctagcaagggatgtaatcggttacatgacgcactgcagcgccgcaggccgcttccgtggttgacgcagccgagcatggctcggctctacatggcttccggcaggtcaaacggcatcccccgttaaaggcccaccgtctcccaccatcgcgtacccgcctgcggcgcctgcatgtccagtgcttcgcccatcatcggcgtggccaccggcacattctttgcggccgccaatgccgtgatgcgctcgaacggctgctgccatgcgtgcagggccagatcgaaggtgccgttgtggatcggcagcagccacttgccgcgcaggtccaggtgcgcctgcagggtctgttccggctgcatgtgcacgaacgcccagcgcggatcgtaggcgccggtctcgatcatggtcaggtcgaacggtccgtacttctcgccgatggccttgaagccatcgaagtagccggtgtcgccgctgaagaagatgcggaagtcgccgtcctggatcacccatgacgcccacaggctgcggtcgctgtcacccagcccgcggccggagaagtgctggcccggggtcgcggtcaagcgcaggccactggcttcagtcgactgccaccagtccagctgttccaccttgctggcgtccacaccccatgcaatcagctggtcgccgacgccgagcggtgcgatgaagcgcgcggtcttgccggccagctgcattaccgcggcacggtcgagatggtcatagtggttgtgcgagaggatcacgccggcgatgggcggcagttcgtcgatgctgatcggcggtgcgtggaagcgcgccggccccatccactgcaccggtgaggcgcgctcggagaacaccgggtcggtcagccagtactggccacgcagcttcagcaggatcgtggagtgcccaagccggaacaggctgcgatccggcgcagcatccagggaggcgcggtccagcggcttcaccggaatcgggtgggcgggcacggtccccttgggcttgttgaacaggaacgtccaccagatctccgcaccgtcgcgcaggcccatcgccggacggggcagggcattgcggaacttgccgtcgcggtactgcggcgaatcggggaagtcggggagggaccaggacttgcagaaggtgtaggcggtcacggcgaggattccaagcaggaggacaaggagcaggcgcttcatgggtgacgtccgctgggtacactgcacagtgtagtttcacatttttcaaaagtacactactgggtgtaaaatggtggcgtccgttcagctatccggtttccgccatgccccgtgccccacaacgcctgaccgaccgcaaacgcgaggccatcgtgcgcgcggcggtggaggagttccgtgcatcgggctacgaggcgaccagcatggaccgcatcgccgaggtggccggggtctccaagcgcaccgtctacaaccacttcccgagcaaggaagcgctgttttctatgatcctggaggagctgtgggaacgcagcgtggccagcgacgcactgccgtatcgcgcggaccagccgttgcaggcgcagctgctgcagttgctgggccagaagctggaactgctcagcgatgccaacttcatcgacctggcacgggtggcgatggccgaggtcatccactcaccggagcgggcgcaggccatcgtctgccgcatgggcgagaaggaaagtggcgagagtgcgtggatccgcgcagcgatcgccgatggccggttgcgagaggttgatccggaattcgccggccaccagctgcatgggctggtgaagagcttcgcgttctggccgcaggtgacgatggggcagccaccattgaccgcgcaggaacgcgcacgcgtcgccgaatcggcggtggccatgttcctgggtttctacgcggtctagctggcggcgaagcgacggaactcgtcggccggcagtgcggccgagtacagatagccctggccgacatccacgcccagcgcgcgcaggtgctgttcctgcgccagggtttcggtcccctcggccaccacgatcgcgccgcagcggtgcgcgacttcgacgatgaagcgaacgatcgactgcgacttggcgtcggacagcgtggcgatcaacgcctgctcgatcttgacctcggcgatggccagctgcgaaagcaggatcagggtcgaatagcccgcgccgaaatcatccagcgacagggtgactccggccgccagcagctgtgcgatgttggcatcgaccaggtcacgctcgacgatctcggtccactcgacgatttccagccgcagcatcgcgccggggatgtcgtgcagctgcagcagttcctgcaggcgcaggccgaattcgggcaggcgcagggattcggctgacacattgactgcgatggtcagcgccgcgccgtcctgccggcagtgctgcaggaagtgcaccgccgactgcagcgtggcccattccaggtctgccagccggccctgccggcgcagcagcgagatcacccgcatcggtgcaatcggccggccttcgccatcgcgcatgcgcagcagcgcttcggcgccgaccagctggcggtcctgcaggcgatgcttgggctggtagcacagcggtgcgtcgccctgctgcagccagcgttcgagggcgaattcgatcagggcgtcgatctcgccgtcgcgctggatcgggtcgtcgaagaacacgacgccggattcgatcgcgctcagtgccacggtgatcgcgcggaacggaagatgtccttcgtcggcatcaacggggggcttcaattcaaccaccgcacaacggaacagtggccggaagccaggccaatcgcggccgacccgatcggccaggttgctggccagctcggtgatctgcggttgtatgcgcagttcggacaaggtcatgccgcgcaccaggatcgccagcgcggcatcaccgaactggtagacctccacgtcgtccaccgccagcgatggcagcaaccggtggacgtcggccggtgtatcgcgctgccacaggccgttgtcctgcaatggcccgtagcgcaggcgcagatcgcgcaggttgcccatctcggccacgatcaggcaggccttgccgatgccgtcgttgtcgcgccagtaccgctgcaggcgttcaccgagcgcacgcatgttgggcaggccgctgatcggatcgatgcgcagccacgcctgttcgcgctggcgctgcgcatcgatctgggcatcgttgtagaccagtgcgaacactgcgccgagtaccagcagcgagaccggcagtgccagcacacgctggatcgccagttcggccaccggtaattgatcggccccaatgatcgccacacccagcgccaggcccagggcggtcatcccgatacgcacggaccacgcctgcaggatcatgcgtggcgagagttcgttgagcatgcgcgggtgcaggcgcctgcgcagccagacgccggccaccatctgcaacacggcctcgaggctggcaggcaggaagaactgggtgccgacgaactggtagcgggcgagcagggcggcggccaggcaggccaagccgccgcgccagccaccgagcaggccactgaccagcaggatgtcgaagccgaggtgcagcttgaccacaccctgggtgtaacgggccacgaaccaggaattgaacaggtagatcaggcccagcgctatgccgacatacaggcgccgtccttcaatggcgtgcccggcgcgacgggtggcgatcagcagcacgccgatcatgccgatcaccgccgtggcctgcagcaggtacagcggcaggctgggcagggcgctgtccaggacctgggccgagacccgtgaaagcgcatccatagcaggttcccgcctgtgaccgacggccagtgacgagcagggtaaaccacaggcgcctgtgcggccaccaagggccaggccaaggtccctgcggtcagtagcgcgggtcggcgatggcgggcagcaccagttcgcgcacgaaggaggacggtgacagctgcagcagggtgcgtaccatcgccacgacatcatggaccggcaccagtgcgccgtcgccgcgcgctgcggcgtccgctaccggcactgacagtgcatcgtcggtgttgaggtagcccagctgcaggctggttaccgccaggcgccgatcccggaagccttcgcgcagcgcatcggcgatgccgttgagcgcgaacttggatgcgccgaacgccacttccgggcggccgctgcgcggcagcgccgaggtcgagccggtcagcaccagctgtggacgtgctgcgcccagtaccctcggcagcaggcgccgcagcagcaccagggtggcggtgatgttgacgtcgaccagctgggcaagcgcggcatcgctttcgtcgaggaaggcgtactcgtcgctgaaggccgtctcttcccagatgcccaggttgtggatgagcacatccagatcggccggcgcctgcgctgcgatgtgattggcagcaagggtgggctgggacagatccgcttcgatccactgcagggtgacgccctcggggcattcaaggtcgtgcgggcggctgcgcgaaacgccgatgacggtgtcgcccgcactgcacaggccttcgacgaacgctcgaccgaggcccctgctggcgccgatgaccatcaatttcatgtggcttccttgttgtgctgcggcggcctcagtcggccgccagaatggtgtcccaatcggcgaacgcgcgcaggccgctgcgtccggcggtgatgatcgaggcggtgttgtcgagctggcaacggtattgcggctgcagcccggacgcccgcgcggacacggccatggcgtgtaccagctgtcgcgcgtgaccgcgaccgcgggcctcgggcagggtcagtacgcccatatcggcgaaggctggatccaggctccaggggtacatgcttcccgcagcgaccaggcgctcgccgtcgaaggcaccgaacacctgccagtgatccagctcgacccatgcggcatcgagatcgtcctcgctggcggtggcctggaacgcgttgaacgctgccgcgtcggtcgcgccgaggcggcggatatgtggtggggcagggtgttcggcgagggcggcgagtgttgcggtggggaagtagaagacacgatccgcgccgtgcgtatgctggccgagctgctgcaagcgctgttgcagctgcgccagtgtccagtgcggttgcgcacgcagttgcaggcgagcggccagggcaggacgcaacagcgctcgggcggggcccgcgaccggctgtaacagcatgccgtcctcaccctcatcgacatcatcgctgcacgccaggagcagctgcggcccctgctgcaacgtgcgctggccggcgaacaagcgctgccaggcagcatcgatcaacggggaaatcgcatcatccatgacaaacggttcgctcagtgtcggggcagttcaacctgcaggcctgcggccttccattcgggatagccggcggccagtcgctgcgcgctgaggccggcttcgcgcagcatcatcactgcatcgttggacagcacgcagtagggcccgcggcagtacgcgacaatgtggacggcgcgcggcagttcgtccatccgcgcgtgcagttccgtagcgggaatgttcagcgcgccgggcaggtgccccagatcgaattcctcgcgcggccgcacgtccagcagtaccacgctgtcgcgttgctccagcagctgctcgacggtcagcccttccagtgcatcgcggcgctgcaggctgtcggtgaggacgccctgcatttcgctgcgctggtggtcggcatagtcgcgcagcgcggccagcaggttggccagtgggccgtcagcgctgcggtagaggatgcgcttgccgtcacggcgggtctgcaccaggccggcacgacgcagctgctgcaggtgctgggaggtattggccaccgacaggccgctcagttcggccaggcgctcgaccgcacgctcgccctgggcgatgtgctccagcagggccaggcggtgcgggtggcccagggtgcgggcgatctcggccagcgcttccagcgcggacggcggcagctcggttgcagcgttcatgccgggcacgctagcatcgctctatcattcaagcaaataattgaaggtaagcggaatgagtggctgggcgacgacattggtgatcgatgcggtagtgatcggcgtgggcgcgaccgcgctgatggatctgtgggcgttgctgcagtgcaggctgctcggcattccgtcgctggattttgcgatggtcggccgctggctcggccacctgcggcgtgggcgcttccgccatgagggcattggtcgttcgctgccggtggccggcgaacgcgcgctggggtggaccgcgcattacgtgatcggtgtggtcttcgccgtgttgttgctggccgtggtcgggaacggttgggtgcaggcaccgaccctgtggccggcgctggccttcggcattctcagcgttgccgcgccgttcttcatcctgcagccgggcatgggcgccggcattgccgcttcgaagaccccggcgcctggcaaggcgcggctgcgcagcctggtggcacacagcgtgttcggcgcaggcatgtacctttccgcgctgctgttggccggggtccgtgcaggatgagcgagaatccgtagggtcaccggcaacaggaacatccccgcatggaagcacccgatcccttcactgatggcatgccgctgccgtgggcgtggcgggaaacattggccgatgcgcgcatcgagcgacagtcgatcggcgtatcgcgcgcagacgtcgcccgtgtgcatcgcccgggacaggctgatgccttcctgaaatcggaagtgatcgatgccttcagtgagctgggcgatgagatcgcgcgcctgcgctggctgcaggcgcagggccagccggcaccaacggtaattgccaccgccgaagaagcgggccggcgctggttgctgatgagcgcgctgcccggccgcgacctggcctcgtcgcctgagcttccgccccagcgcctggtggaactgctggccgatgcgctgcggggcctgcatgccatacctgtggcggcctgtccgttcgaccagcggctggcctcgcgcctgcaggccgcgcaggcacgggtcgaggcgggcctggtcgacgccgatgacttcgatgacgagcgcctggggcagagcgcacagcaggtgttcgccgaactgcgcgctacccggcccaatcacgaggatctggtggtcagccacggcgacgcctgcctgccgaacctgctggcagccgaaggccgtttcagcggtttcatcgactgtggccggctgggtgtggccgatcgctaccaggatctggcgctcgccgcgcgcagcctggtccacaacttcggcgacacgcgctgggtcgcgccgctgttccggcgctatggcgttgtgcccgacgaacggcggctggcgttctaccgtcttctcgacgagttcttctgaaacctcggagggcagcgtaggcagggctgaacggtgccctgccggcggacccgggcgcccttaaaagtggacgaacgttcgttcactatttgtggcatgaaccgagccgaccgcaacgagcaacgcatcgcgcagatcctgcaggccgccctgcagtgctttctcgtgaagggcttccaccagaccagcatgcgtgacatcgcgcaggcggccggcgtcagcctcggcaatctctacaaccacttcccgggcaaggaggcgatcatccttgcggtggccgtggccgaaggcgaggaactggcaccgttgctgcagcgactggccgcgtccgatggcgagcgcgcacgggtgctggttttccttcaggacttccacgcactgtgccggcaaccggagtgggcaacgctcgccgtcgaagtgctggccgagagcgcacgcaatccggccgtggccgaggcatttgcggccaatcgcaggcaattgcaggcgacgctggccgaagccctgcagcaggtggcacggcgcgaacgtcggcgccccgtgctggccccggcactgcaggcacaggtgctgctggatgccatcgaaagcgatgccctgcgccgagggctgggcgaagccgggggcaccgatgaggcatcgctggatctcggcctgcttgcgctgctgctgggcgcacgcgcatgagcgccgtcgaccggcgactgcacggcgttgatctggcgcgttacctggccttggccggcatggtgctggtcaacttccgcctggcgatggccgtgccggcagagggcgccggatggttggcaggcgtcttccactttctggaaggcaaggcttcggcgacgttcgttacgctggccgggttgggcctggtactgggcacgcatcggcagggttggtggccggccagtgtgcagacctggcggcgcgcactgttcctgctggtgctgggcctgctcaacctgacgctgttcccggccgatatcctgcattactacgcggtgtatttcgcgctggccgtgctgtggctgcgggcctcgccgcgggtgttgctggccagcatcgtggggatcgcggcctgttcgttctgggcgttgctgcactgggactacagccagggatggaactggcagacgctggaatacgccggtctgtggcaatggccgggcgcggcccgcaacctgctgttcaacgggttccatccgctgctgccgtggctgtgcttcttcctgctgggcatgctgctggcgcggctgcaactgtcgcaaccgcgggtccagcgcgcgctgctggtgctgggcctgatgctgatcgtggctggacatggcgtgcagtaccttgcgcagggaacgccctggcaggcgtggctgggaacgcagccgatgccaccgggaccggcctacgtactcacaggcgcgggcgcggcctgcagtgtcattgccgcctgcctgtggctgacgcgtgtacgaccgggtgactggctggaaccgttcaccgcggccgggcgcatgaccctgaccctgtacgtcggccatatcctgctgggcatgggcacgctggaaggcctgggcctgcttgatggcagcgcgtcgctcgcgtcggtgctgctgtgggcattgttgttcctgatgctggccacgggcgcagcgtggctgtggtcctggcggttcgcgcggggcccattggaagcggtgatgcgacgcgtcgccggctagcactttggtcgcgcaggcacgatgttgtgacggacatgtctgtgtcgcggcccgcgcatctgcgatagtggcggcaggtaatactctccgcttgcatccatgtcattcgcttcggcgcagcatctcggcgaagtccttcagcagtcctatggcatcaccgccaatgccgtggtgccacgcccggttggcgccgatgccaacgccagtgtgtatcgcatcgatgcacggcgcgggcaatggtggttgaagtgccgcagttaccaggttgcccctgccgtctgggacaccctgcattggctgcgcggcacgctgggcatcgaggaaatcgtcgcgccctggccggccctgaccggtggagcgtcagtgcagcgctggggcctgcagttcaccctgttcccgtatgtggaaggccagtccggcttcgaggcggcgttgagccgcacgcagtggcaacgattgggcgaggtgctgcggcgcctgcacgaggcgtgcccgccaccggcgctgcaggaggcgctgccgagcctgcggatggaaaccgcggcgcttgatacggtcgggcaatggctggccggcgagggcctggcggccgccagggatgggctgggccgcgccttcgtatccgtctgggaccagcagcatgcgcgcatcgcggcgctgcatgcgcaggcactgcagctgcacgcggcgttgcaggatgtcccggtgcggctgcacctgtgccacaccgacctgcatgccggcaatctgctgatgggcaatgacggcagcctgcacctgatcgattgggatggcctgtcgctggccccgcgcgagcgcgacctgatgttcatcggtggcgcggtcggtgggcgctgggggcgcgagaacccgttgggattcgaggaaggctatggcagtgaccgcggcgatccacgctggatcgcctggtaccggcactggcgcatcctgcaggacctgatcgagttccagcaggtcctgctgggcagtgatggagaggaccgttcgccgcagctgcgccggcagtcgctgcactatctgagcgagcagttcgcaccgggcaatgtattcgacgcggccgagcgggtgtatcgcgcgctgtagatcccacgccatgcgtggatggcagttcctacgatgaaccctcacgctgcgcggcgggtcgggcatggcccaaatctacaggggcgcgcggtgtctgcgcggggtgtggatctactctgcgggcttggccgctgcagaggcggctgcgctggcggcgcggcgcgacagtacggcctcgcggtgggcaatgtaggcgttggcggcgaggatgatgccggcgccgatgatcgtccagcggtccacgctttcgttgaacagcagccagccgaacagcgttaccagcggcagctgcaggaagctgatcggggtcagcgccgagacttcacccaggcgcagcgcccgcgtccacaacagctggccgatggtgccgagcacgccggtggccagcagccacagccaggccacgccgctcggccagacccagacgaacagcgccggaagcagcgacagcggcacccagaacacgtaggtgtagagcaccacggtatcggcgctgtcgacgcgggtgagctgcttgatctggatcgccaccagcgaactgagcaccgcggcggccacggcgaccaggctgcccgcggtgaagccggcggtaccgggtcgcacgatcaccagcacaccgatgaagccgaccacgaccgcggcccagcggcgcacgcgcacggtttcacccagccacagcacggcggcaatggtgacgaacagcggcgtggagtacgacagcgacaccgcctgcgccaacggcaggtggcccagtgcccagaacgcgcacagcatcgagcccaggccaatcgcactacgcacgaaatagcgcggcagctgctgcgtcttcagcggcgcacggcccggccgcagcagcatcggcagcaacgccagcaggccgaaggcattgcggaagaacgccacttcctgggtcggaacgtagcgtgtggcatagcggatcgctaccgccatcaggccgaacgccatcgtactgccgagcatcaacagcgccgcccgcatcggagtggcgccgggggagagggcgagagtgttcaccactgtgcgccgagcaggcggggctccggttcgatcggcacgccgaacttctccagcaccgaggccgagatgcggcgcgccagcgccagcagttcagcgccgctggcattgccgtggttgaccagcaccagcgcgtggctgggagccacgccggcatcgccgtcgcggaagcccttccagccgcaggattcgatcatccaggccgccgagaccttgcgcttgtcgtcctgctcggccgggaacaccggcaggtcggggaaatgctgcagcagcacgtcgacctgctccagcggcagcaccgggttcttgaagaagctgccggcattgccgagtacctccgggtcgggcagcttgcggcggcggatcgcgatcaccgcattggccacgtccaccgcgcccggcagcaccacgccctgcgcctgcagctcttcgcggatgccggcgtagtccatgcgcagatcgtgcagcagtggcagtttcagttcgatggcggtgatcaggtagcgatcgggctgttgcttgaacacgctgtcgcggtaggcgaaaccacactgttcgttatccaggcgcacccaggcctgttcctggcagtcccaggcttcgaccgcctggatgaactcgccgacctgcgcgccataggcgccgatgttctggatcggtgcggcaccggcggtgccgggaatcagcgccaggttttccaggccggacaggccttcctgcagcgaccacatcaccaggccatgccagggcacgccggcgccggcgcggatcacggcatggtcggcgcggtgttcaaggaaactgatgtcgcggttgccgaacaccagcacggtaccgggcaggtcctcggcgatcaggacgttgctgccggcacccagcaccagcagtgggccgttggccacctcgggcagtgccagcacctccggcagcagcgcggcatcgtgcagttccagcagctgttccgcattggcctgcacgtggaaggtgttcagtccctgcagcggcgcattttgggtgagcgtccagcgcagcggggcgttgccgtcgatggtgtccatgggcgcgctcacagtggggccaccgcgccgcggctgggcgcttcgcggcggcgacggatcgcctccacgcattcggaaaccagcgccggtccacggaagatcaggccgctgtagcactgcaccagcgcggcaccggccgccatcttggccacggcatcggcaccggacaggatgccgccgacgccgaccaagggcaccgactcgggcaggcgcgagcgcaggcggcgcagcaccagcgtggactgctccagcaccggcgcaccggacaggccaccggcctcgttggccagcggatcgccggccaccttgctgtggtcgatggtggtgttggtggcgatcacgccgtccacctgcagctcgcccagcacgcgggcggcggcatcgatgtcgcgctcgctgaggtccggcgccaccttcaccagcatcggtacgcggcggccgtggcgggccgcgagctcttcctggcggtcacgcagcaggctgaccagctggcgcagcgcggtttcttcctgcagttcacgcaggccggcggtgttgggcgaggaaatgttgacagtgatgtagtcggccagcgcgtacaccttgtccaggcaggcgatgtaatcgtccacggcctgttcgttgggggtgtccttgttcttgccgatgttgatgccgagcaggccgcggcggttgcgcgcgcgctcgacgttgcgcaccagtgcgtccacgcctgcattgttgaagcccatgcggttgatgatcgcgttgtgttccggcaggcggaacaggcgcggctgcggattgccggcctgcgggcgcggggtgatcgtgccgatttcgacgaagccgaagccgagcgcgaacaatgcatcgatgtgctccccgttcttgtccaggccggcggccaggccgaccgggttggggaacgtcagcccgaacaccgtgctgggcatcggcgcgatgcgtgcggccagcagcggcgtggtgccggtgcgataggccaggtccagtgcggacaggccgaggccgtgggcgcgctcggcgtcgagcgagaacaggaaggggcgggcaagcgaatacatgcgtcggttcagtccagcgtgccgaggaaggctcgggttcgatattcaaaagcaacctggccgtcgaccgcgtgggcggcgaacaggtgctgcagagcgtcgatcatcggtgcgtggcgcggatgaccgggttgaggggcgtaggaggaggacagcaggcgcccgcgcagggcgtcgaagtccaggtgctgcacgttcggcagctccaccctgccgcgcaggccagcgccgaaccaggcctgcatggtggcgtcgtcctggtagcgctcggccacggcggtgtagtcggtgccgtagtccagcagcagctgttcgtacccgatcaggaacgggctcgcatcgagcaggcgagaattccagtagatgagggcctggccgccggggcgcaggatgcgctgccactcggcgcgtaccgccacggtgtcgaaccaatggaaggcctgcgcgacgctgaccagatcgatgctggcatcgtccagcgcggtggcctcggcgcggccgtccaccgcacggaactgcgggtactgcggtgccagccattcttcggccgcgccccgcatggccgcattgggctcaaccgcgacaacaggatggccgctggccaggaacaggcggctggaaatgccggtaccggcgccgatgtcagccacacgcgcctgctggctgacacccatcgggccatgcagccactccagcagcgcgggtgggtagtcgggccggtagcggacgtagtcggcgacgcggctgctgaagcgttcagtgctgtcggaggcggtcatggcgtcagttcgacaccgccgccagccacgccaggccgccgaagaacaggatgaagaccacgatggcggcaagtgccgcgccgaccatgacccagcccagcaccaggccggtgacggccaggccatcgccttccagttcgtgcgggcggcggcggatttcggcgcgggccatgtggccggtgatgatggcgacgatgctggccacgaagggcaggacggtccagctggcgatgcccatgaccaggctgaccacggccagggcgcttgtctgtcggggtgccacgctcatcggggtcctccttggcagtgtgcacatgatagtgcctctgccccggcaatcccatgcccggcggatgggatggcaggcgtcgaccctggccgacgaatgggatttcggccctggtaggcgtcgaccttggtcgacgaaagggatttcggccttggcaggcgtcgaccttggtcgacgaaaggcatgccaaccagggttggcggctaccgaagtgccggtatcagcccatcaacacctggccgccatccacattgagcacgctaccggtgacccagcgcgccagcggcgagcacaggaacagggcggcgtcggcgatctcgcgcgggtggccgaagcggccgaacggaatcttcgccagggtgccgtggtacagcgcagggtcctcgacgcggcgacggtcccagaggccgtcatcgaactcgatcgagcccggggcgatggcattgacccggatccggtccttggccagcgccagcgcctgtgacgtggtgtagtgcgaaagcgccgctttggccgcagcatacggcgcgccaccggggcgcggctgctgcgcggcaatcgacgacagattgaggatgcaggcgtcgctggaggcacgcagccatggcagtgccaggcgcgaggcacgcacggccgccatcaggtcgatctgcaggctggccgcccagccgtcctcgtcgtcggccatgccgtagccggtggcattgttgaccagtacatcgataccgccgagggcatcggcagcggcctgcagccaggcctggatctggccgggatcggccagatcggtggaaaacgcgtgcagttcgaagccctgcgcccgtgcatcggcacgcagggcatccaggccggcctggccgcgggcgcagaccgagacctgtgcgccggcgccggcaaaggccagcgccatttcacggccaatgcccttgctgccgccggcgatgagcacgcggcggccgctgaaatcgagggtcggagcccctgcggggatccgacccctcgctggggccagatccccggaggggctctggcccacggacgtgtccgcgtcgtttgccatcacaggtcgaacttgatgccctgggccagcggcagcgaatccgaatagttgatggtgttggtctggcggcgcatgtagaccttccacgcatccgaaccggactcgcggccaccgccggtgtccttctcgccaccgaaggcaccgccgatctccgcaccggacgtgccgatgttgatgttggcgatgccgcagtcgctgccggcggccgacaggaacttctcggcagtcttcaggttctgggtgaagatcgaggacgacaggccctgcggcacgccgttctgcatgtcgatggcttcatcgagggtgtcgtacggcatcacgtacaggatcggcgcgaaggtctcgtgctggaccacggcgtcgctgttcttcaggccggagacgatggccggcaacacgaagttgcccgggcggtcgatgcggctgccaccggtttcgatggtgccgccggccgccttggcctgggcgatcgcatcgaggaactgctgcacggcgccttcgctgttcagcgggcccatcaggttggccgcatcggtcgggtcgccgatcttgccttccacctgcttgtaggccttgaccagggtggccagcacatcggcgtagatcgaacgatgcacgatcaggcggcgggtggtggtgcagcgctggccggcggtgccgacggcgccgaacacgatgcccggcacggccagcttcaggtcggcggtttcgtccaggatgatggcgttgttgccgccgagttccagcaggcagcggccgaggcggcgcgcgaccttctcgttgacggtgcgaccgacctgggtcgagccggtgaagctgatcagcggcacgcggcggtcatcgaccatcttttccgacagcgcggtgccggcatcgttgatcaggaagaagatgtccgggaagccggcttcgcgcagggcgtcgttgcagatcttcagcgaggcgatggcggtcagcggcgtcttgttggacggcttccagatgcacacgtcgccacagatggcggccaggaacgagttccagctccacaccgccaccgggaaattgaaggccgagatgatgccgaccaggcccagcgggtggtactgctcgtacatgcggtggccggggcgctcggaatgcatggtgtagccgtacagcatgcggctctggcccacggcgaaatcggcgatgtcgatcatctcctgcacttcgccatcgccttccggcttgctcttgcccatttccagggcaaccagcgaacccagggcgtccttgtgcctgcgcagtgcttcaccgcacaggcgcacggcttcaccgcggcgcggggccggcgtggtacgccagaccttgaaggcttcctgggcgcgggccacgacggtctcgtactcggcctcggtggtcgcgcggacctgcgcgatcggctcgcctgtggtcgggttgaccggggtgatcagctcaccgctggtcgcgctcgaccactccccgttgcccaggtacgtgccagcgttgatcgcgtccaggccaagggacttgagcagctcggaagacatgcagactcctgtatttcgttacgttgtttggcgccatcgcgggcaggtgggggacgcgatgaactgaatcgccgatggtagcagagcgccccggccggccatggtgcaacgcgccagccaggcctggccgaacatgaatgcttggagggcagggcacgttgcctgtaaacttcccggctgcatggccccgtagctcagctggatagagcgtccccctcctaaggggaaggtcgcccgttcgaatcgggccggggtcaccagaatcaatggaacagggcgagcggcgtcgtcgggcttgaatgggtctacttcggacggaccgggatgatgggtttcaccgtgacaaccccgctgccacctcctccgcagcttccatagcagcctccgccagggttaaatccgccagttccaccagcacctccgccgctgccaccgccggcacctccaccgccacggctgggcggctgctgagttcccggcaggggctggacgcaagggcttccagtgaggcaagtaacagcggcttcttcgacggacccgtcaccccaggtcaccttgatcctgctgccgacaggcaaagacgcaatgccatgcgtgattcggtacatgcccgccaaaccgacaaggccggtgcgtcgcagctccaccatttcgtaggcggacaaattctgcgcaactgcaacctggttatacggatacgaactggcgttgatcgatactgttgcagcaacggcggcaaaggccgtgaaaaccagcccggcgatactccacttcgttcttccggagattcgattcactgcggcgtccttttcaagatggcttcttcccaactgctctgtttacttctcctattgctctatcaagcgactcttgctgtccagcaggaaccaccctgctcctgacggcgccttcaaaattctctgatccgcacacgcccgaattgacacatagtgaatccatgcggaatgagccggctccgcaatctgcccccattcggcaggcgacgatgccccaggcatagttggcgtatggacccgtagcgcttgcattgaaggcaccgagatcggttccctctggcgcgagcgctagcagatctcccagtgcaaaaattgcctccgggtctgcagaattgaccgcatcgcgtgccagtagctgatagtcaccaggtttgaggctggtccacttgctggatgccatgtaaatcctggcgtaaggatcgccgtgatctgccgcgcgttcaaaccattttgtatagtgctcttcgagtatcacgtcgccgccgtcaacgaccgagcaggtcgctgcgaagcgcttcttgatgtcatcgtatgcgccttgcgttttcccgctgaggcgcgcgtatgcgtccaacgtcgcatacatgttcgaatgggaaatgctgaaaacggagcaatgctgataaatctgccccagcttgcgctgtgctgctacgtccccggcttctgcacgtgaacgaagttcaagaaatccggctgctgcatcctgtgtgttggaactcaactcaggacctgtgagggatgaggcggtatggctagagttggcctgatccttggagtttggctgattggtttgagaatcaggtttgcgctgttgtgtgtccgctttggttgggacataccaaaaactgactcccgccaagacgatcagtatcaatgcagagaagctcaggactttgactcgtggagacatggcgttccttcatgaccgatcagcgcggtacgcgtgcagggattgtcacggtgcccaatcaggggctgggctccgaccgccgcgcactttggcaggtcccatgcctacaaaacgggatggggcgacgctccccccatcaggccataggtctagttcagtatttgtttatgtactggacgctgagtggaagcctggacacgcctaatcctggttcaggccgagccccaccttcgctggggtggatctttgacgatagagggcacttgttcgaatcgggccgggggcgctattgcatgcaccgcgcgtgatgccccttcgcgcaggctacagagcaactccaggcctcgcagcacctccgccacgtgcgcctgctcttcgcctcgcaacccaagcagcggctgcggcaggcagtcgtaactgcacaggcccatcagtgccgccgcgcatgccatgacgcggacgccgccgaagcggttgtacagcgcccagagcggcgccgccggatcccgagggcagaaggaaaagaggggttgtcaggtgtggcggcggtggacgatcggcattgcttattgccctggtacaaaattcaagcgctgccgtgcaacgtgatccggccgccgggatcgcgcaccatggcggccatccttccttgcgcgcacgccatgagtgagtaccttcgccccgtgcagcctccgcacttcgccgccatcggcgcgtggctggattcggccagcgcaacccggcgctgggccggtcccggcgtggcgtatccgctcgtgccggacgcattcgcgcacgcactgcaactgcagcagcgcccgggctgggtgctgctggatgcgcatggccactgccttggtttcggccagtactggccaacgacctccggcacgctgcacctgggccgcatcatcgtttcgccgcgggcacgcgggcgtggactgggacgtgtactgatgcaggcgctgatggcgcaggcgttgcagtcgcccggggcggagcggctgaccctgcgtgtctatcgtgacaacgtcgcggcggtgaccctgtaccgcgacctgggctttcagccgatggaagacgcttcgacgccggaactgctgttcatgcagcaccgtgccggctgagtggtgatcacgcgcgcagcacggaagcctgttgcgcctgccattgctcgcgggtgatgcggctgatgtgttcggtgcggtagtcgccgaggaagctgttgaacttgttcacttcggtatggtgatgctggaaaccgcatttgctctgtacgctcagggactgcaggttgtcggcgaagtagccgcaccacagtgcgtccaggcgcaggccgaggaaggcgtgccgcatcacttcgcgcactgcttcgggcaccaggccgcgcccccagtacggtacgccgatccagtaggcgatctcgccttcgcgctcgccgatctcgaagttgctgtcggcaccgatcaggatgccgacgcagccgatggcgcggccatcttcgcggctctgcagggcatagacctccggccggttgaacacggtgcggatgatcccggtactttcctcgacgctggtgtgggctggccatccggcgatgggcccgacgcgcaggtcgcgggcgtattcgtacaggtcggcggcgtcggtgtcgcgccaggggcgcaggatcaagcgttcggtatgcagcggcatggccgttccaggggcagggagagagcgcacaggctaggccgcgtcgggcggagggcacagggcgggaccttgatggtttcggtacttttcacaactccccggcgttgcccggtatgctgtgccgcggaatgcagccggatcggccaatggaccgcataccccagcttctggatcaggacgaatcgatgcgcctggaggtcagtacgctggcggaggggcagggggttccgctgtcgttcgggcacgcgtatctggcggtactggtgtgcgtgtccgggcgtgcgcgcttcgcactgaacttccgtgaggtggcggtgcagcggcacgacgtgctggtgctggccgaggacacgctggcgctgctgcggaagcgatcgcgtggcttcctggcggtggtctgcctgatgccgaaggcgctggcgtcggaggtggcctacgtactgcccaacgcgctgttcaagttcctgcatgagcatccccattgcgtgccgtcgccgctggaggtgccgctcctgcagggctggctgcagcagctgatggacgcgcaacatactgggggccgctatcggcacgtgatgctgcgcaatctactgcagacctttttcctgaaattcgccacgctgttgccggcacagaagggggccgcagcgtcggtcagccggcgcgagcgcctggcctggaatttctgggaactggtcggccagcgcagtacccgccagcgcgacgtgcagtcttatgccgatgcgttgtgcatcacgccgttctatctttcacagctgacccgcgagtgcttcggtgaaacacccaaggcgttgatcgaccgccaggtggtgctggagatcaaggcgctgctgagctacagcgagctgccgatcgggcgcatcgccgagcgattgtgcttcgaggatgcgtcctacctgtgccgctacttccggcggcacaccgggcagtcgctgaccggctaccgccgtgcggggcagggtggcgctggtgggatacgaacagcggtgccggcacttcggacagcagatcctcggtaaccccgccgagcatgcgttcgaccacgcagtcgcggcggtagggccccggcacccgtagatcggcttcgccaggcctggcgaaaggtcaatcctgcttcaacagctcgaccagctggcgcaggcgatagggcttgggcaggaactccacctgctccggcagcggcggcagctgcgagcgcgcatagccggaggacaggatcatgcgtgcctgcggctgttcgcgggcgacgtgctcgctcagttcgatgccggacatgccgttgggcatgctgacatcgctgaacaccacgtcaaaacgcgcctcgcccttgagcagctccgccgcctcgtggccatcggcggtggtggcgacctcgatgccgaaatcgcgcagggccaggccgatcatctcgcgcagatcgttctggtcctccaccatcagtacgcggatcggttcatcggtcatgggttgcttcctctgatgcgggtaacagcaggcttaccgtcgtgccgacaccgggcgtggtggacacatcgacgaagccgccgctctgggtagtgaatccgaacacctggctcaggcccaggccgctgcccttgccgatgtccttggtggtgaagaagggctcgctggcgcgctcggcgatgtcggccgccatgccatggccttcgtcacagacgctgagggtgacatagccgcgttgcagcgtagtgtccgcatccgggtcgagccgatgttccagcgcggtgccgatcaggatgcgcccgccatcgatggtggcctccacggcattcgccaccaggttggccagggcagcctgcagctgcatcgcgtcggtgcacacctgcggcaggcccggcgtgaggcaggcgtccagcgtcaccgtgggcgggcaggcgcgctgcaggcccggcagccattgctgtaccagcgtgttgatgtccagcggttcgcggatcagggtctggcccgtgctgaaggccagcagctggcgggtcagcagggcgccgcggtcggtggctgcctgcgcagcgtccagcagctcggcggcgcgtgcatcgtcaccgcggacgcgtagcgacagcaggtccagtgcgttgccgatggtggtcagcaggttgttgaactcgtgcgacaggccgcggctgagccggccgaccgtctcgaactgctgggtgttgcgcagcgcacgctgggcatcgcgcagcagtcgctgtgcctgccattgctcggtgatgtcgcgggtgatcttgacgaagccaagcagttcgcccgcttcaacgaccggctcgatgaccacgctggcgcggaacgaggagccgtcgcggcgtacccgccagccctcgcttgcaacatggccctgctgcgccgcgaggcggagcaggcgctgcggttcgccggcctcgcgctcggtggccaggtagaatcgaccgaagtgcgtacccaccacttcatcggctgaatagcccttgatgcgctcggcgcccgggttccagctgcagacgatgccttcaggatcaagcaggtacagcgcatggtcgcgcacgctgtcgatcagcaatcgcagttgtcgggaagggtccgtcagcacggacgtcgtagaggcagctgcgtccacgtgtagataagtgttacccctgtgagggacgtgaagctaggcagtcaagtgtgaaggatgcgtgcacacctgacacgtgccatttgtcctgtgcggctgaatgcgacacggagtaccatcttccaccctttgccttctggaaccgacctgcatgcgtcctggtgcgactacgcgtgaccgctggatctggatgacctctgccgtattgctggcggcgaccatcgcgctggaactggtggtaccgctgggatacgcggtctggctggcctatttcctggccgtgggcgtcacggtgttccagcgcagtgcgcgcgcgccgttcgtggtcgcgatgatcgcctgtatcctgctggtgatcggcttcaacgtggcgcccgccagcaacaactcgtcgttctcgttcgtcaaccgcaccatcggtggctgcgccttcctgatgatcgcgctgatcgtctcgcgcgccatccaggcccgccgccaggccatgcgcgcgctctggctgcaggaggccgagaacgcggtggcgtcgagcctgcgcggtgacctggggccggagcagatcgccgaggcggctgcgacgagcctggccgggcagctggacgcggaggtcggtgcggtctatcggctggaaggcggacggctgcagctgaccggtggcatggcgctgccttcgggcgcgccggcctcgctggccctgcacgaagggctggccgggcaggtcgctcgtgatgaacggatccgccacctgcatggcgacgatgccgccgtgcttgaactgcagaccagcctgggccggctgccggtgcgcgagcgcatcctggcgccgctcagcagcgatggtgccgtggtcggcatcatcgaactgggccgcgcccgggtcggtgaacagcgtgatctggatcgcgagctgctggagcgctgtgccgagaccatcggcttggcgctgcgcgcatcgctgttgcgtgcgcaactggtggtgctgctggaagagtcgcagcgccagggcgaggagctgcaggcccagcaggaagagctgcgcgtggccaacgaggagctggaagagcagagccgcagcctgctgcagtcgcagagccacctggaagaacagcaggccgagctggaacagagcaacgtgcagctggaagagcgcacccacgagctggaggcgcagaagcaggcgctgctggtcgcgcagagccagctggtgcgcaacagcaacgaactggccgcgacgtcgcgctacaagtccgagttcctggccaacatgtcgcacgaactgcgcacgccgctgaacagctcgctgatcctggccaagctgctggccgacaacaaggacggcacgctcaccgaagaacaggtgaagtacgcccgtgcgatcctctcgtccaacaacgatctgttggcactgatcaacgacatcctcgacctgtcgcgcatcgaggccggccatgtcgaactgtccgatgaagtggtggtggtcgacagcgcgctgcagcgcctgcgcgagaccttcgagccgatggcgcggcagaagggcctggccctgcagatcgaagccgatgcgctggcaccgagccagctggtggtcgacagccagcggctgcagcagatcctgaagaacctgctggccaacgcggtgaagttcaccgagcacggaaaggtcagcctgcacgtgcgtgcggccggcaatggccgcatccggttcgaggtctgcgacaccggcatcggcatcgcccgcgagcagctggacgtcatctttgaagccttccgccaggccgacggcagcacccgccgtcgctacggcggtaccggcctgggcctgtcgatctcgcgcgatctggccgagcgcatgggcggccagatccaggtcgacagcgagcccgggcgcggcagctgcttcatcctggagctgccattgcagggcgcccccgcggcgagcgcagccgaggctgccgaggcccccgtggcagtgccggcgccggcacggacaccggccgtgctgccgcccgcgccggtgcgcgctgccactgcgtcggcgccggccactgcgtcggccggcgtggccgacgaccgcggccgccgccagcgcgccgggcgcctgatcctggcggtcgaggacgatgccacgttcgccgaagcactggtggccctggcccatgaactggacttcgactgcgtggtggcgggtacggcggaagaagcgctgacacttgccagtgagctgcgtccgaacggcatcctgcttgatatcggcctgccggacgtgtcgggcctgagcgtgctggagcgcctgaagcgcaaccccgaaacccggcacatcccggtgcatgtggtctcggcaacggaccgcagccaggtggcgcgcgagctgggcgcgatcggcttcgcgatcaagccgaccacgcgcgagcggctggtgacggccatcgagcagctggaacagaccagccagcgcgacgtgcggcgcctgctgatcgtcgaggacgacagcgagctgcgcagcaacctggaactgctgctgggccgcgaccagctgcagatcgtcgcggtgggcaccctggccggtgcactggaacagctcagcacggtcacgttcgactgcatggtgatggacctgtcgctgcccgacggcagcggctacgacctgcttgaacacatggccggcaacgatgaggtcggtttcccgccggtgatcgtctataccggccgcgcgctcagccgcgaggaagagcagcgcctgcgccgctattccaagagcatcatcatcaagggtgcgcgttcgccggaacgcctgctggatgaagtgaccctgttcctgcacagcgtcgaggccagcctgccgaccgaccagcagcgcctgctgcgcgaagcgcgccgtcgcgacaccgtgctcgatggccgtaccgtgctgctggccgaagacgatgtccgcaacatcttcgcgctgtccagcgtgctcgaaccgctcggcgtcacgctggagatcgcgcgcaatggccaggaagcggtggatcgcctggccgagcgtgaggtcgatctggtgctgatggacatcatgatgccggagaaggatgggctggccgcgatgcgcgagatccgcgcgcagcgccacctgcaggacctgccgatcatcgcgctgaccgccaaggccatgccggacgaccgtgagcgatgcctgcaggccggtgccaacgattacatcgccaagcccatcgatgtcgacaagctggtctcgttgtgccgtgtctggtgctcgcggcaatgaacgaacaggcgctgttcgacctggaactgaaggtgctgctggaagcgctgtaccagcgctaccactacgacttccgcagctatgcggtatcgtcgctgcggcggcgcatccgccaggccatgcagcgctacgagtgcgagcggctggccgacctgcagcaccgcctgctgcacgagccggacctgttcgcgcaggcgatgcagttcttcaccgtgcaggtctcggagatgttccgtgacccggcctatttccgtgagctgcgcgagcaggtggtgccggtgctgcgcacctatccctcggtgaagctttgggtggctggctgcagtacgggcgaggaagtgtggtcactggcgatcctgctgcacgaggagggcctgctcgagcgcagtatcgtctatgccaccgacatcaatccggcagcgctggccaccgccgaagccggcgcctatggcatcgaccgcatggcccagttcagccgcaactacctggcggccggcggcaccgcttcgctctccgactactacgccacggcctacgatggcgcggtgttcgaccgtcagctgcgccgcaacgtggtgttcgccgaccacagcctggccacggacaccgtgttctccgaagtgcacctggtgtcgtgccgcaacgtgctgatctatttcaaccgcgacctgcaggatcgcgcggtgggcctgttccgtgatgcgctggtgcatcgcggcttccttggcctgggcagcaaggagtcgctgcagttcgggcgccaccacggtgcgttcgaggtctgctcgcgcgagcatcgcctgtaccggaaggtcgcctgatgagcctgctgatacgaccggccgtgctggtgatcggggcctctgcgggtggggtcgcagcgctgcagacggtgcttggcgcgctgcctgcggcactgccggcgccggtgctggcagtgctgcacctgccacgcgatcgcagcagccgcatcgccgaagtgctggcgccgtactgcgcgctgccggtgcgcgaggccgaagacaagcagccgctgcagcctggcacggtgacctttgcgccaccggactatcacctgctggtggaagacgccggttcgctggcgctgtcggtggacgcaccggtgctgttttctcgcccggccatcgatccgctgttcgagtcggcggcggcggtgttcggcgcgcaggtgctggccctgctgctgaccggtgccagcagtgatggcagcgaaggcgtggccgccgtgcgcgccgctggtggccgcgcctggctgcaatgtcccgaggaggccgaggcatcgatgatgccggcctccgccctgcagcacgctggcgccgatgccgtgctgccccttgaactgatgtgccgtcgcctgaaggagttgtttgcatgaacctgttgccaccggaccctgcgcagtcgcagaccccggtcaacctgctgatcgtcgatgacgtgccgcagaacctggtagccatgcaggcgctgctgcagcgcgagggcgtgaacctgctgcttgcgggctcgggtgcgcaggcgctggagctgctgctggagcacgaggtggcgctggcattgctggatgtgcacatgccggagatcgatggcttcaccctggccgagctgatgcgcggttcgcaccgcagccgcgatgtgccgatcatcttcctgaccgcctcgccggatgacccggtgcgtgccttcaagggctacgaaaccggtgcggtcgatttcctgcacaagccggtcgcaccgcaggtgatcctgagcaaggtcaacgtcttcatcgagctctaccagcagcgccagctgctgaaggcgcgcaacgaggcgctggaacgttcgctcaagctcaacgagacgatggcggccgtgctcacccatgacctgcgcacgccgctgtcggcaatcctgctgtgtgccgacaagctggcgctggagcttccagaggacaatgccggtgcgcagcagaccctgaagcacctggaagccagcaccctgcgcatggcgcggatggtcgagcagctgctggacttttcgcggatccgcagcggcggcctgcgcctgcaggcaagtgcctgcgatcttgcggaggtgacgcgtgccgtggtggccgaagcgggcagcgcccacggccacgcacgggtgcatctcgacatgcagggcgatacccgcctgcagggtgatctggatcggcttggccaggtcgccgcgaacctggtcggcaacgcgcttacccatggcagcgaggcgagggtggaggtggacggccgcgatccgcgcagcgtgctgctgcgggtaagcaacgccggtcggatcgacgacgcgctgctgccgcgattgttcgagccgttcaaggccagtttccaccccagcaatggcctggggctgggcctgtacatcgttgatcagttcgtccgcgcgcacggcggccacatcggcgcgcgcaacgaggcggggcaggtggtgttcgaggcgacgctgccacggcgctctgaatgcccggcaacggcggccagctgaatccttcagcaagcgacgcgtggatctgagacgggctcgtccgcaactgctaccgtggcggcagatattgccaaggaagcaccatgccactgcgtgcgatcgcctatgtcagccgggcgctgccggatctctccgctcgacggctgcaggcgctggtcgacgatgcggcccgcttcaacaaaatggccggcgtgaccggcgtgctgctgcacgacggcgggcgtttcctgcagtacatcgaagggccgccggatggcatcggttcggtctacgaacgcatcctgcaggccggcagccatatcgacatcattgaactggcgcgcggccgcctgggccagcgccagtttccgtactggtcgatgcgcgcgctgccggtggaggaggcgctgttgcgccagctgtcatccagtgactggtcgggctttacccgtacgctgcagggtgatcgctccgcgccgacgccggtggacctgctcgacaacgttgtgcagccagcactgcacgccggctgagcgtcagcccgaggtgccgccgccgcaataggcggcatgcagcgcctgcagcacgcccaatgcgggcccttcctgcatgcggtagtggatggcctgtgcttcgcgccgggtcgccacgatgtccatatcgcgcagcacagccaggtgctgcgacagcgcggacgcactcaatccggtcagcgcctgcagctccggtaccggcgcttcgccttcgatcaggcggcacagcacgcgcaagcgggcaggatgggccaggcgcttgagcagggcagcggcctgcgcggcgtgcttggccatcgcggcactgtcgagcggggtgctgggcatggttgacctttttgtttagacgtgtctaatttagataaatctaaataaaagggcaatcccatgaagggcgtgaatgagggcagggcatgaacctgccgtggactgcggtagccggcggtgggttgatcggcgccgccgcagtgctgttgctcgccaccctcgggcgtgtggccggtatcagcgggatcgccgcaggcagcctgcgcgcagcggaaggcgagcgcggatggcgctgggccttcctgtctggcctgctcgcggcggccgggctggtgctgtggtggcagtcgctgcccgacgcgtcgccgcgggttcagttgcgcgatgccttgcctgcctggcagttgatcggcgccggcctgctggtgggcttcggcacccgcttgggcagtggctgtaccagcggtcacggcgtctgtggcatggctcgcggctcgaagcgctcgctgctggcggtgctggtgttcatggcctgcgcgatgctgacgacgttcctcatccgccacggcggaggcccggcatgagccgcgcgacaggggccgcggcagcggcgggtgcgctgttcggtgcggggctggcgctttcggggatgaccgacgcgcgccgtgtgctcggcttcctcgacattgcgggtgatttcgatcccaccctggtgtgggtgctgggctcggcgctgctggtcagtgcggtcggccagcgctgggtgctgcgccgcgcgcagccgtggttcgcggtgcgcttccagctgcccagtgcgcgtgatgtcgatgcgcgcctgctgctgggcgccgcactgttcggtatcggctggggatgggctggctattgcccgggaccggccatcgccgggctggcagtcgcatcgcgtgaagcgctgtggttcgtgcctgcgatgcttgcaggtttctggctgcacgatcgggtcgtacgctgagacttcacccctgtgtcaccctgcgtgcggtcagatccggggttcacggggaaaggagcacaacgacatggtacggatgaagtggacgggcagggcaatgctggcggtcgcactggccgctgcggtggcaccggcgctggcctgcacgcgcgcggtgtacctgggtgacaacggtgatgtgatcaccgcacgctcgatggactggaaggtcgacgtggccaccaatctctacgtgctaccgcgcggcatcgcgcgcaccggccaggccggaccgaagtcgctggcctggacagcgcgctatggttcggtggtggccaccggctacgacgtgtcgaccaccgatggcatgaacgagaagggcctggtggccaacctgctgtggctggtcgaatcggagtatccgcagcagcgcggcaacaagccgggactggcgatttcgctgtgggcgcagtatgtgctggacaatttcgcgaccgtggacgaggcggtggcggcgctgaagcgtgagccgtactcgatcgtcaccgacaaggtgccgggcgaggaccgccaggcaacgctgcatctgtcgctgtccgacgcgagcggcgacagtgccatcgtcgagtacatcggggggcgccaggtgatccaccatgaccggcgctaccaggtgatgaccaactcgccgatcttcgagcagcagctggcactcaacagctactggcagcagatcggtggcacggtgatgctgccaggtaccaaccgctcgtccgaccgcttcgcgcgtgcgtcgttctacatcaatgccattcccaaggccgaggacccggtggaagcgctggccagcgtgttcagcgtgatccgcaatgcgtcggtgccgtatggcatcaccacgccgggcgagccgaacatctcatcgacgcgctggcgcacggtggccgaccacaagcggcggttgtacttcttcgaatcggcgctgacccccaacaccttctggatcgatctgaacaaggtcgatttcggcggccaggtgctcaagctcgaccttggcaaggaccagcgcaacacgttcgccggcgatgcattgggtcacttcgtacccagtgcaccgttcgccttcctcggcgtggacggctagcgcgaggcctggtccggcgcgttcttcggatagaccgccagcacgctgcagcccgggcgggcgaagcgcggcgtgctggcgcgcatgtcgccggggattccggacggcgtctccacgatgcgatcgcccggattgccacagatcaagccgttctggaaaccggactggaattccaccgaggtcgccccggccaggatcgagcagctgccggccagttcgacgcggtagtagcgattgccgccattgcggcgcggattggtctccaccaccacgccttgcggatcctcgttccagctgcgcacatggcgggtggcgaagcagaacgctggcgaggcctggaaggtatggcgcgggctgctgccgccacggctgggcttgcctgtggcggtcacgttcaccggcggcagggtggccgcgtacaggcggctgctctggcgagcggtgctggcgaactcccggttgtcgatgggggtgacactgccgacgccgcagcggcggccatccaccatcacctgttcactggggcggccgcaggcccagcccgaaggcgcctccagccgcagtgcgctggcttcgttgacacccgggcaggctgcgctgaagtcgatgcggaaggcctggcccctgccatcacggaccgcgatggcggtcggtgtctcctgctcgacctggcgtacgtcacgtgcgtccaggcagtgcggtgcaggtgcgatgcgctcggcggccgatggcgcggatggcgcctgggccagggcggccaggggtaaggcgctggccagtgccagcggaagcaatcggatcatgctgttcatcctgccatccctgcgtctgtaactggctggaacatagcatggccggtgccggggccgcgttgcagggaaatgccagcacgcgcacactcgtcatatgggcgcgatcttccacctgcggcactacggccaggccaccggcctggaccgtcatgactacgcgcagtgggtgctgccgctgcagggcgaactgcagttcgagatgcaaggccgcggtggtcgcctggacctgctgcagggggccttcgtcgcggctggcgaagcacacgaccagatggccgatggcccgaatgctttcgtgatcgtcgactgccccccgggtgtgctcgatgacggtacccaggaacacctgtgccgccagcgctggctgcatctgccactggcgctgcgacagcgcctggcgcaggtgtgtgagggccaggcactgccggccctgttgccgcagctgctccaggtgttcgcaccggcgggcagtggtgcgcgcctgcagggcctgtgcgcggcggtgcaggttgatccgggccaggcgtggccggtagcacgcatggccgccttcgtcggtgtcagcgaaagccggttgcatgcgctgttccagcgcgagttcgggctgagcccgcaggcctggctcagtgcaagccggttgcgttgggccaagcaccaactgcgtaccagtgcggcgccgatcagcgatatcgcgctggcggcaggctattccgagcagagtgcactgacccgtgcgctgcgtcgtgagtgcgggcagacgccggccgcctggcgcaggggcgccatctgacctgtagagccgagcccacgctcggctgcccttatctgcacagcggccaatcgcagccgagcattggctcggctctacagagatgacaaggcaatagcctcggtcaagagcgcccgctggccagcgcttacactgcgcggcccgttctcttcccccgaagaacccgaatgcgcaacaacccgatggccctgggcatcgccaatggcgttgccgctggcgcgctgtggggcgtggtctttctcgcccccgccgtgctgcagtcgttcaatgccctgcaactgtccgccggtcgctacctggtctatggcctgattgccatcgctctgctgctgccgcgctggaagcggctggcaccgcggctgggccgcgccgaatggttcgggctgctgtggctgagcctggccggcaacctggtgtacttcctgctgctggccacggcggtgcagtgggccggtggcgcggcggcgtcattgattgtcggcctgattccggtggtggtcactgtggttggcgtgcgcgagcagggcgcggtgccgttgaagcagctgctgccggcgctgggcctgtgcgtgctcggcgtggcgctggtgggctgggaagcattgatgtccgaatacctcgcaacaccgtggcggcagcgcctgatcggcctgctctgtgcgttcggcgcgctgttctcgtgggcgctgtactcgatcggcaacagtcgttggctggcacgccggccggacctgtcaagccacgactggtcgttgctgaccggcgtcaccactggcggcctggccctgctgctggtgccgatggccttcatcggccacagcggtacccacaccgcggcgcaatggagtggcttctgggcgatcagcgccggcgtggcagtggtggcctcgatcctcggcaacgcgttctggaaccgtgccagccgcctgctgccattgaccctgaccgggcagatgatcgtgttcgagacgctgttcgcgctggcgtatgccttcgcctggcagcagcgctggccctcgctgctggaggcgctggcgatcgtgttcctggtggccggcgtgatgctgtgcgcgcatgcccatcgctcgccacgggcgatcgccgaacatgcaggctgaatgcgggcgtcaagcgtgctgatgccggcttggtctcagatgcaaccaaatgccggcacgttggccgatgatcgccgcattgattttttgcgtcgcagcacttgacagcggaccggcgcacagtgttttctgtgcgtcatggtccttgatgccgcccacgccagcctgttcgcccccgccattgcgggccgtccgactgcgccggtcgccaccaccaccattaccaccaccaccgtcaccactgccctggtgcggcccgtcgtcttcgtgtaactcccgaaaaccacggccccgcaccatccaggtggcggggaaactcgacacctgcatgcgacggggcctcctaccgaggtctgcatgtcttcccacgcccccgcccatcccgttgccccggccgatctggctgcaccgtccactgtcgtgcacaagttcggcggcacctcggtggccgatgccgaacgctatcgccatgttgccggcctgctgctggcccgtcctgagtcgctgcaggtcactgtcgtctcggcgatgaagggggtcaccgacgcgctgatcgatctggcgcagctggcggcaaagggtgaccagggttggcgcgaggcctggcatgccctgcgcgcgcgccaccgtggcgccgccgtggcgctgctgggcgagcaggtcggcgagacggtcgaatggatcgacgcccgcttcgatcagctggccgaagtgctggcagcgctggcggtgatcggcgagctgccgcgcgaggtgctggaccgcgtgcagggcctgggcgaagtgttctccgcgcagctgcttggcacccacctgcgtgccttgggcgaagactgtgcggtgctcgatgcgcgcgatgtgctggtggtcgggcatggcgagctgggcgtcgatgtcgactgggaagccagcgccgaccgcctcgcgcaatggcgccttcaacatcctcaaccgcgcctggtcgccaccggtttcgtcgcgcgtgaccgtgatgaccgcatcaccaccctgggccgcaacggcagtgactactccggcgcgatcttcgccgcgctgttcaatgccgatgaactgcacatctggaccgacgtcgacggcgtgctgtcagccgacccgcggctggtacccgaagccgtgcagctcgaatcgctcagctacgacgaggcctgcgaactggcctacttcggcgccaaagtggtgcacccgcagacgatgtcgccggcgatccgcctgggcctgccgatcttcatccgcaatacgttccaaccggcgcatccgggtacgcgcatcagtgccgagcgctcgccgcgtgggccggtaaagggcctgaccctgagcccgggcctggccctgttgaacctggaaggcaccggcctgatcggcgtgccaggcactgcagagcgcgtattcgctgccctgcgccaggcgcaggtgtcggtggtgatgatctcgcagggttcgtcggaacattcgatctgctgcgtggtgcgcgccgccgaagctgcacgtggccgcgaggcgctgctgcatgcgtttgcgcatgagctgtcggtgggccaggtgcagcgcgtgcaggtcagcgagggcgtcagcgttctggcggcggtgggcgacggcatggccggtcaacccggcgtggcggcacgcctgttcgaggcgctgggccgcgcacaggtgaacatcctggcaatcgcgcagggctcgtccgagcgcaacatttcggtggcggtggacagtgctgatgccacccgcgccctgcgcgccgcgcatgccggcttctggctgtcgccgcagaccttcgcggtgggtgtgatcgggcctggcaacgtcggtgccgcgctgctggaccagctgctggccgcgcgcccgcagttgctggccaaggccaatgtcgacctgcgcctgcgcgcactggcctcgcgttcgcgcatgcggctggatgcggatgggctgcatgccgactggcgcgaagcccttcagcaggcgggtgagcccagcgatctggatcgcttcaccgaacacctgctggccgcgcacctgccgcatgcggtggtgatcgactgcagtggcagtgccgaggtggccgagcgctatgagggctggctggcagccggcatccacgtggtcacaccgaacaaacaggccggcgccgggccgctgccgcgctaccagcgcatccgcgccgcggcggcggccagtggtgcgcgtttccgctacgaggccacggtgggcgcgggcctgccggtgatcaccacgctgcgtgacctggtcgataccggtgacgaggtactggccatcgaaggcatcttctccggcacgctggcctggctgttcaaccgcttcgatggcagccagccgttctcgcagctggtcgcgcaggcgcggtcgatgggctacaccgagccggacccgcgtgacgatctttcgggcgtggacgtggcgcgcaagctggtgatcctggcccgcgaagccggccacgcgctcagtcttgagcaggtggaagtggaaagcctggtgccggcgctgctgcgcgagggcagcgtggatgacttcatggcgcggctgggcgagtccgacgccagcctgctgcaacgcctgcaggatgcgcgggcgcgtggcgcggtgctgcgctatgtggcacggctgggtgccgacggcgcctcggtggggctgcaggaactgccggccgatcatgccttcgccaacctgcggctgaccgacaacgtggtgcagttccgcacccgtcgctactgcgacaacccgttggtggtgcaggggccgggtgcgggtccggaggtgacggcagcgggtgtgttcgcggacctgctgcgggtcgccgccggtgaaggagcgcggctgtgatcgcacgtgcgttcgcgcctgcctcggtggccaacgtggcagtgggcttcgacattctcggccatgccattgccggtatcggcgataccgtgagcgtgcgccgcatcgacgagccggtggtgcggatcgatgcgatccgtggcagtgccgtcgcgctgccactggacgccgccggcaacaccgccggggctgcgctgatgtcgctgcgcgaaggcctgggcctggatttcggcttcgcggtcgagatcgacaagggcatcccgttcggttccggcatgggcggttcggcagcgtcgagtgtcgcggcgctggtcgccgccaatgcgctgctgcaggccccgttgccgcgcgaagcgctgtacccctacgcgctggacggtgaggcggtggccagtggtggccgtcacggtgacaacgtcggcccgctgctgctgggtggcctggcgctgtgcacggccgatcgcctgttgccggtcccggtgcctgccagctggcacagcctgctggtgcatccgcacgcggtgctggaaacgcgccgtgcccgccaggccctgcagggcagctatgcgctgggcgagttcgtggcccagagcgcgaacctcgcgctggtgctcagtggttgccatcgcagtgatgcgacgctggtacgcgcgggactgcgcgacgtgctggtcgaaccgcgacgggccggattgattgccggcttcgaggccgcccgtgatgcagcgctgtcggcccatgcaatgggcgcgggcatctccggtgccggacccagtgtgttcgcctggttcgaggatgccgaccaggcccgtgccgccgtggcgccggtgcaggcagcgttcgctgcggccggcttcgacagtgacgcctgggtatcgccgctggatgcgccgggagcccggctgtgctgaatccttccccttctctggaaaccgatcccatgcaatttgtttcgacccgcggccagtctcccgccgttggcctcagcgcggcgatcgccgccggattggcgcccgatggcgggctgtatgttcccgcgcgtctgccggccgcgcgcgagctgcaggccggggcgaccctggccgataccgccgccgatctgctggcaccgttgtttgcgggcgatgcactcgagactgcgcttccggcgatctgccgcgaagcgttcgacttcccggtgccgctgcgtgcactcggcgagggtgaccacgtgctggagctgttccatgggccgacggcggcattcaaggatatcggcgcgcgcttcctggccggtacgctgtcgcgcctgcagggcggcgaggatcgcgatctgacgatcgtcgtcgccacgtccggcgatacgggtgccgccgttgcggcggccttccatcgccagccgggcgtgcgcgtggtggtgctgtatccggagggtcgcgtgtctccgcgccaggcgcatcagctcggttgtttcggcgacaacatccaggccctgcgcgtgacgggcgcattcgacgattgccaggcgatggtcaagcaggcgctggccgaccgcgaactgcaggcgcaggtgccggtgagctcggccaacagcatcagcctgggccgactgctgccgcagatgagctactacgcgcatgcagcgttgacccactacgccgcgcatcgtcgccggctcaacctggtggtgccgaccggcaatctgggcaacgcgatggcggccgtgctggcgcgcgcgctgggcgtgccgatcggccagatcgtgctggccaccaatgccaatgccgtgctgccggcgtacttcaatggtggcgactaccagccgcaggccagtgtggcgacggtggccaatgcaatggacgtgggtgcgccgagcaacttcgagcgactgcgctggctctaccacggcgacgacgcagagctgcgtgcagctttccgcgcgttcgcggtggatgacgtgaccatccgcgcgacgattgccgcagcgcatgccagcggcggcgagcagttctgcccgcacacggcgacggcggtgaaggtgctgcaggatctgcgcgcgcgcggtgccaagggcgactgggcggcggtggctacggcgcatccagccaagttcgaggctgtggtcgagccgctgatcggcgaaacggtggcggtgccacctgcgctggatgccttgctgcagcgaccagcgcacgccgaaccattggcggcagattacgcggccttgcgcgaggtgttgctgcgttgatcgcagatggaggcggttgccggccagcggctggcactacccgtgttgcatccgtccggtagtgccggccgctggccggcaacccaaccaaccgcgatacggtcagatcaacccttcaccggccagcgtgcgcagaccatcctcgtcgaggatctccaccacgttcaggtggggcagggcgatcagcccctgctggcgcagcttggtgaaggtacggctgaccgtttccatggtcaggcccagatggtcggcgatatcgccgcggcccatcggcagcgacacgcgcaggccgtcgccccccagcttggcctcgcgcgcggccaggcgcagcaggaaatcggccagcttctcggccggctgcaggcgtgccagcgccagcgcagcatcctgtgcggcatccagttcctggcaggcgcgctgcagcagcttgcgctccaggtgcgggaagcggctgcgcagggccttcatctgtggcagcgcgacacggcacacgcggctgtcggcgatggcctcgatgtcgtagcgatggtggtcgctgccgctcaggcccaggtagtcgccgggcagcacgaaaccgttgatctggcgccggccgtcggccagggtgcgcaccaggcgcagtgcgccggcggtcaatgtatagacatggtcgcgctcttcgccggtgcgggccagcgtgctgcccatgctgacctgctgcgagacggtgacctgttccagcgcctgcacttcgtctggcgacagcgccgagcacaccgcaaggtgccgaaccgagcagtgcaggcagtccagcgtggtgcaggacggcgaggcgggatcgttggtggcgggcggagcgccggaaggccgtgacatgttgcggggggcgtatcgcgggcggggagggccttatgatacttcaagcggccgttcgaccctgccggaggcgggggcgctagaatgtcgccccctcccacgtcccgttccagcaggagttccgcccgtgatcaagccccgtaccccgcccggcacccttgagctgctgccgcgcgagcagattgcgttccagcgcatgctggacgtcatccgccgcaactacgagcgcttcgggttcctgccggtggagacgccggtgttcgagctgtccgacgtgctgctgaccaagtccggtggtgagaccgagcgccaggtgtatttcgtgcagtccaccggcgcgctggccaacgcggccgagtcgggcgaccgttcgctgccggaaatggcgctgcgcttcgacctgaccgtgccgctggcacgctacgtggccgagcacgaacacgaactgaccttcccgttccgccgttaccagatgcagcgcgtgtaccgcggcgagcgtgcccagcgcggtcgtttccgcgagttctaccagtgcgacatcgacgtgatcggcaaggacagcctgagcgtgcggtacgacgctgaagtgctggcggtcatccatgcggtgttctcggaactgcgcatcggtgacttcagcatccagctgaacaaccgcaagctgatgcgcggcttcttcgagagcctgggcgtggctgaaggcgagcgccagctggcggtgctgcgcgaagtggacaagctggacaagcgtggcgccgattacgttcgcgagacgctggtgggcgagggcttcaacatcccggcagaacaggtcgagaagatcctggccttcgtcgctgtgcgttcgcagggccatgccgatgcgctggcgcagctggccacgctggaagccgacgccggttcttcggagatcctgcgtagcggcgtcgccgaactgcgcgaagtgctgcagctggtgcaggcgctgggcgtgccggaaaccgcatactgcctgaacttctccattgcgcgcggcctggactattacaccggcaccgtctacgagaccacgctgaccgaccacccgcagatcggctcgatctgttcgggcggccgttacgaagacctggccagccactacagcaagtcgaagctgccgggcgtgggtatctccatcggcctgtcgcgcctgttctggcagctgcgcgaggcgggcctgatcgacggcatcgaagccagcagcgtgcaggcgctggtggcgctgatggacgagcagggcatgccgcagtcgctggacatcgcgcgccgcctgcgcgccggtggcatcaataccgaagtgcagatggagccgaagaagatcggcaagcagttccagtacgcggccaaggccggcatccgcttcgtggtgctggccggtgaagacgagctcgcgcgcggcgtggtggcggtgaaggacctgctgcgtgaacagcagttcgaagtgtcgcgcgacgagctggccagcaccctgctggtggagctggagcagtccagggcgatggtgtgaagccggccgtcgcaggggtactcaccgtgctcctgttggcgggctgccagagtgacccggtgctgcgcagtgatcggctgggcccggcgcagtaccggctgcaggttgatcgctgtcacgtgatcgaccgcgcgcagcttgagggcgacctgcgggccctggcctcgcggacgtgcccggcgggtgcaggggcgttgcagaacatccagtccctgccgagccggcagggcagcctgttcggggagtgcctgcggcgcgggacgctgcaggcggaggtgcgttgcctgccctgagtcgagccaggttgttgatttgaaagaagaacgcccgccctttggtgggcgttctgcatttccggcatccggtccaggggtcagatccgttttcctttggaaaacggatctgacccccatgaggctccgatttgacgcactgcgcaagaatgcgctaatgtactaacgcgctattacattgatgcatggacccgaccccgtgaaagcccgccccgagattgccgccaaagacccgaaggccgacctggaagccctggcccgggcctttgccgcgctgcgcgagccggagcaggtcgaggcattcctgcgcgacctgtgcaccccggccgagctggaggccatggccgaccgctggaaggtggtgccgctgctgcagcagggcgtgccgtaccgcgagatccacgagcgcacgggcgtcagcgtgaccaccaccggacgggtggcacgcacgctcgagcatggccatcgaggctatgccgccgccatcgaccgccttgcttcgcgctgatccgcgccccgttccgaacttcgagacctcccccatgagtgcaacccaggcagcgccggcacgagaccggctgcgtatcgccatccagaagagtggccggctggccgagcccgcccgcaacctgctcagcgcctgtggtctgagctggcgcgaaagccgcgacaagctgttctgctacggcgaatcgctgccggtggacctgttgctggtgcgcgacgacgacatccccggcctgatcgccgatggcgtctgcgacctcggcatcgtcggtcgcaatgaactggacgagcaggccgcggcacgccgccagatcggcctgccggacgcctaccagacgctgcgcgggctgggcttcggccagtgccggctgatgctggcggtgcccgaggaatggcagtggcagggtccggcgcagctggccggcacccgcatcgccaccagctacccggccatcctcaagcagtggctggcggagcagggcgtggacgcgcaggtggtcgagctgtccgggtcggtggaaatcgccccgcgcctgggtaccgccgacctgatctgcgatctggtctccagcggcgccacgctgcgtgccaaccagttgaccccggtacacaacctgctcgacagcgaggcggtgctggctggtgcgatgcgcgtgccggatgacgcacgtgcatcgctgcgcgcgatgctgctgcgccgcctcgacggcgtggtgcagcgccaggaccgcaagctgctgatgttccgtgccagcgaagatcgcgtcgacgcgctggcgcagctgctggccgatgccgagccgctggtgcggctgccggccgatggtggcgcgctgcgcctgcagaccatgtgccccggcccgctgagctggcagcgcatggaagaactcgagcgcgcgggcgcgcagggcctgatggtactgagcgtggagcgatcgctggcatgaaccgtctgatctggtcccgacttgatgaggccgcgcgcagcgcggcattgacccgcccggtgcaggccgtggcgcagcagacccgcgatgccgtagcggccctgatcgcgcaggtgcgtgcacagggcgacgatgcgctgcgtgcgattacggcgcgtttcgatggcgtcgagctggcctcgtttgaagtttccgaagccgaattcgccgctgccgaagccgccgtgcccgccgaactgcgacaggcgatggtggacgccgccgaacgcattgcgcgcttccacgccgctggcatgggcaaaggctatgcagttgaaaccgcgccgggcgtggtctgcgaacgcatgctgcgcccgatcggccgggtgggcctgtacgtaccggctggcagcgcgccgttgccgtccaccgcgttgatgctgggcgttccggcgcagctggccggttgcccgcaggtggtgctgtgcaccccgccgcgcgccgacggcagtgccgatccggcagtgctggtagccgcccgcctgaccggcgtgcagcgcgtgttcaagctgggcggcgcgcaggcgatcgcggcgatggcctatggcacggccagcattccggcctgcgacaagctgttcgggccgggcaacagcttcgttaccgaagccaagcagcaggtcgcacaggacggcgccgccgccatcgacatgcctgccggtccttcggaggtgctggtgattgccgatgctggcgccaatccggcgttcgtcgccgccgacctgctgtcgcaggccgagcacggtccggattctcaggtgctgctgctgaccgacgacgccgtgatgctggcggcggtcgaagccgaggttgagcgccaggtggccctgctgccgcgccagcagatcgcgcgccaggcactgtcggcatcgcggctggtgcaggtcgatgcgttggacgaggcgttcgcgatcagcaaccgctatgcaccagagcacctgatcctggccctgcgtgatccgcgcgcatggctggacaaggtgcaggcggccggctcggtgttcctgggcgattacacccccgaagcactgggtgactactgcagcggcaccaaccacgtattgcccaccgccggtgccgcgcgtgcctacagcggcgtgagcgttgccagcttccagaacctgatcagcgtgcaaagcgccagcgccgccggcctggccgcgatcggcggctgcgggcgcatcatcgcccgtgccgaaggcctggatgcgcacgagcgtgccgttgcgttgcgcatggaggtggcggcatgagcgcggcgatcgatgaggtgctggcactggtgcgcccggacctgcaggccttcgccggctacagctcggcacgcagcgcggcggtgcagggcgaggtctggttgaatgccaatgagtcggcctgggccaatgcggccgatcccgcaggcagcagccggcgctatccggagccgcagccgctcgcgctgcgcgagggactggcggcgctgtacggcgtgacgccacagcagctgctgatcggtcgcggcagcgacgaagccattgatctgctggtgcgcgcgctgtgcgtgccgggtcgcgatggcgtgctggtcacgccgccggtgtttggcatgtacgccgtctgcgcacgcctgcagggtgccgccttgattgaagtgccgctggtggacagcgaggatggactgcgcaccgatctggatgcggtgatcgacgcggccaaggcgcagggtgccaagctggtgttcctgtgtgcgccgtcgaacccggccggcagtgacatcgccctggatgaggtcgagcgcgtggcggttgcgctgcgcgggcaggcgctggtcgtggtggacgaggcctatgtcgagtatgcacaacggccgtcggcgaccacgttgctggccgcgcacgccaatctggcggtgctgcgcacgctgtcgaaggcgcacgcgctcgcggccgcccgcgttggcacgctgatcgctgccccggagctgattgccctgctgcgtcgctgccaggcgccgtacccggtgccgacgccgtgcgcggaactggccgtgcaggcactgcagccggccgcgctggcgcgcaccgccgagcgcgtgaccacggtgatcgccgagcgcgggcgcctgcgtgcagccctggccggcctgcccggcgtgtgccgggtgtatgcctcggccggcaactacctgctggtccgtttcgccgatccccagtccgcgttcgatacgctgctggctgcgggcgtggtggtgcgcgaccagcgcgctgcgccgcagctgggtgatgcgctgcgcatcagcatcggcagccccgaagagaatgaccgcgtgcttgcggccctgtcggcgcggagggccgcagcatgaccccgatcctgttcattgaccgcgacggtaccctcatcgaggagccgtccgacttccagatcgacgcctacgaaaagctgcgcttcgtgccgcaggtgatcccggcgctgctgaagctgcgtgatgccggctaccagttcgtgatcgtcaccaaccaggacggcctcggcagcgacagctacccgcgcgccagcttcgatggccccaacgacctgatgctgcagatcttcgagagccagggcatcaccttccgtgacgtgctgatcgattccagctggccgcaggacaatgcgccgacccgcaagccgggcatcggcctgatgaccgcctacctgcaggaccgcagcatcgactgggcacgctcgggcatggtcggtgaccggatcaccgacctgcagtttgccgccaacctcaacatccgtggtttccagctgcgcaccgcgcagtttggtggggagtgggactggccgggcatcgcccatgcgctggccgacgcgccgcgcaccgccgttgtccagcgcaacaccaaagaaacgaagatccgcgttgagctggacctggaccgcgcgggcgatgcacgcattgccaccggcctgccgttcttcgaccacatgctggagcagatcggcaagcacggcggcttcgcgctggacatccaggccgagggtgacctgcacatcgacgagcaccacaccatcgaggacaccgggctggccctaggccaggccctgcgcgaggcgttgggcgacaagcgcggcattggccgttacggcttcaccctgcccatggacgagaccctggccagcgctgcgctggacttcagcggccgtccctatttcgtgttcgagggcgagttcaagcgcgagcgcgtgggcgatatgccgaccgagctggtgccgcacttcttccgttcgctgtgcgatgccagcggtttgaacctcaacctgcaggtgcgcggcgacaatgatcaccacaaggtggaggcctgcttcaaggcgctggcgcgtgcgctgcgtccggcgctggcccggcagggcacggcactgccgagtaccaagggggcgctgtgagcgatgttgcgctgatcgatgccggtggcgccaacctgggctcggtgcgctacgcactggagcgcctgggcgcgacggtgcggctggtgcgcgatgcggacggcctggttggtgcgccgcgggtgatcctgcccggcgtcggcgccgccggtcccggcatgcagcgcctgcacgctcagggcctggtggaaccgctgcagcgactggaggtgccgttgatgggcatctgcctgggcatgcagctgctgttcgaacgctccgaggaagcgggcgtagagacactgggactgattccgggcgtggtacgcaagctggtgccggcctgtggcatccgcgtgccgcacatgggctggaaccgcctgctgccgctgcgcgaatcgctgttgctgcagggcgtgccggaacgcgccagcgcctacttcgtgcacagctatgcggcgccgctcaatacccacaccgtcgctgcctgcgaccacggtggcctgttcaccgccgtggtggagcaggggcgctactacggcgcacagttccatcccgagcgctccggcgagaccggctcgctgatgctgcgcaacttcctcgagggcactgctgcatgagtttcatcgtctaccccgcgctggatatccgcgacggccgcgtggtgcggctgcgccagggcgactacgcgcaggaaacctcctatggggatgaccctctgccgcgcgcgcaggccttcgccgcgcagggcgcgcagtggatgcatctggtcgacctggatgccgcacgggccggtggctacacgctggcgccgctgttggcatccattcgtgcgcagaccccgctgcaggtgcagaccggcggtggcgtgcgcggccgcgatgatgtggcgcgcatcctcgacgctggcgccggccgcgtggtggtgggttcgctggcggtgcgtcgtcccgatgaagtggtcggctggctggaggaattcggcgccgatcgcatcacgattgcgctggacgcgcgccaggacgcacaggggcagtggcagctgccggtgcacggatggaccgagaacgccggggtgaccctggatgacctggcccggcgctacgcgcgcgccggcatgcgccatctgctgtgcaccgacatcgcccgcgacggcatgctggccgggcccaacatcagcctctaccagcacctgtcggcgctgttgccgggtgtggcggtgcaggcgtccggtggcatccgtgacgtggccgatgtggccgaggcgcgtgccgccggctgcggaggtgccatcctcggcaaggcactgctggagcagcgcatggacctgagcgaggcgttggcatgttgagccgccgcatcattccgtgcctggacgtgcgtgatggccgcgtggtcaagggcgtgcgcttccgcgatcacgtcgacatgggcgacatcgccgagttggcacagcgctatcgcgaccagggcgcggacgagctggtgttctatgacatcggcgccagtcccgaggcacggtcggttgacgtcgcctggatcgagcgcatcgcgcgcctgatcgacattccgttctgtgtggccggtggcatcgacagcgtggaaaccgcgcgccgcgtgctgttcgccggtgccgacaaggtgtcgatcaattcgccggcgctgggccggccggagctgatcaccgagctggcggacgagttcggcgtgcagtgcgttgtggtgggggtcgattcggtgcgcgaggccgacgggcaatggcgggtgcgtcgtttcagcggcgatccggacaagacccaggcggtgccgctgcgcacgctcgactggatcgtcgaagcgcaacggcgtggagccggtgagatcgtgctgaactgcatggacagcgacggtgtgcgccgtggctacgatgtcgtgcagctgcagcaggcgcgggcgctgtgccaggtgccgctgattgcctccggtggtgccggagcgatggagcacttcgccgacgccttcgaccaggccgacgtcgacggtgcgttggcggccagtgtgttccacagcggcgccatcgccattccagaattgaagcgctacctgcgcggacagcagatcgaggtgcgggatgtctattgaagtgaggccatcgctggatgcgctgcaggccctggactggggcaagggcgacggcctgctgccggccgtggtgcaggatgccgataccctgcaggtgctgatgctgggctatgtcagcgccgaatcgctggcggctacgctggccatcggccacatgacctttttcagtcgcagcaagcagcggttgtggaccaagggcgagcagtccggcaacgtgctggtggtgcagtcgatccgtgtcgactgcgacgccgatacgctgctggtgatggcgcgcccggccgggccgacctgccacaccggtgccgagagctgtttcgaccaggcgccgaaggatttcctgggtgggctgggccagctggtggccatgcgtgacgcgcagcgccctcccggcagctacaccaccagcctgtttgaaggcggcatccgccgcatcgcgcagaaggtgggtgaggagggcgtggagaccgcattggccgccgtggcgcaggatgatgaggcattgctgggcgaggcgtcggacctgctgtaccacctgctggtgctgctgcgcgcgcgcgggctgtcgctggatgatgcgcgcgcggtgctggaaaaacgccatcgttgaggaaggcgtacggaccaacggtccgcacccacctctgcaatgcagccgagcatggctcggctctacaataggtggtcttcttctttcccggaccgcccatgaaactgcctgccgcctggctgtgctgcctgttgctgacctcgccggcctgggccgcggacaccgtggtcagcggcaaggtctatctggagcgtgacggcaagcccggccgcggtgcgaccgatccgggcctggccggggtgcaggtttccaacggcgagaccatcgtcaagactgccgctgacggcagctacagcctgccggtgcgcgacggccagaccgtattcgtgatcaagcccgatgcctacgccttcccgaaggcggcggacggcctgccttcgttctggcgccactaccgcccgaacggctcgccggcgctgaagtacggcggcatcgccgcgaccagcgacgtcacccgcaactgggacttcgccctgcagtcggatcggcatgacagccgtcgtggtttccagatgctggtattcaccgattcgcagaccgccagcctgaaggacatcggctactaccagcagtcgatcgtggcgccactggtcggccagaccagggcacgcatgggcaccaccctgggcgacatcgtcaacgacgacctgaccctgtacccggcgatcaacaaggtcaccaccgaactcggcgtgccgtggttccacgtgccgggcaaccatgacctcgacttcgatgcggccagcgacgaacactcactggacagctggcgcaacatctacggcccggacacctacgcggtggaagagggcggcgccagtttcgtgttcctggacgacgtggtgtacgaccccaaggccaggccgaagtacatcggcggcctgcgcgaagaccagttcgccttcctcgccagctacctgaagggcctgcacaaggaccgcctgctggtgctgggcatacacatcccgctgttcgacgcggcgccggggcgcgagaccttccgccatgctgaccgccagcgcctgttcgacctgctgaaggacttccgcaacgtactggtgctcagcggccacagccacacccagcagcacgtctaccacggcaaggccgagggctggaacggcgacaagccactgcacgaatacaacgtcggtgccaactgcggtgcgttctggtcgggcgtgaagaatgccgctggcgtgccggacagcaccatgagcgacggcacgccgaagggctatgcattgctcgacgtggccggcaacggcagctatcgcctgcagtaccgcgtggccggcaggccggccagcgagcagatcggcctgcacgcgccgaaggtgctgcgccagggggcctacccggcgtggggtgtctacgccaacgtctacatgggcgaggatcggagcgtggtcgagtaccgtgtcgatggcggcgcctggcagccgatgaagcaggtcagccagcccgacccgcgcctgatggtggagaacgtggccgatgatctggccagcagcctgcgcggctacgaccgttcgcccgaggccactgcgtcgccgcacctgtggcgtggcgcgctgccgaccgatcttgcagtgggcagccataaggtcgaggtacgctccacccagcctgatggcgcagtgttcaccgccgccaccagctacagcctgcagactgcccagccctgacccccgcgcaccagcgctccagcgaaaggaccccgtatggatatccgcttcatggccggcaccacaccggtgaccctcagccgccactggttcaccggcgcgatgctgctgcagagcgccaccgagaaggtctgggtgcagcacccgctgcatccgggcacccacttctcgttctcgctggtacagtcgtggctgcgccacatcgccggccacgaagtgctggtcgagcgcacccggccgctgttgttcgccggcttccgcccacagcgcctgcgcgtgctggtggatggggtgcaggtggccgaacaggaaggcatgtaggttcacctgaaccaccggcgcgctaggcaaagccgtcccgatgcctgagaatcggggcgattcaatcgatccaagcaggccagcgtgaccatcgcagcagcgtcaacggtttcctccgactccgcccgcggcggtcttccgcgccgtctggtcgtcgccgatgtcggcggcacctttgcccggctcgcgctggcggaaacccgacccggccagacgccgctgctgggcagccaccgtacctatgcctgtgccgagcattccagcctggccgcgatcctcgccgatttcaccgccggcctcggccacccggtgcagaccgcggtggtcgccatcgctggcctgctggatggcgatgtgctgatcaactcgaacctgccgtggacggtctcgctgtcggccacccgcgcgcagtccgggctgcacgaactgcagctgatcaatgatttcgaagcggtggcgctggccatcccctacctgcagccggaaaccctggtgccactgaacggcgacgccgatccggcgcaggccttcccggcgctggtgctgggcgcgggtaccgggctgggcgccgcgctgcgtttcgctgatggcgagcgtccggtgctggccagcgagatcggtcatgccgcgctgggcgccggcaacgcgctggaactgcaggtgctgggccgcctgctgcagcgttggccgcacgtggacaacgaacgcgtgctgtccggcagcggcctgatgaacctgtatccgtgcctgtgcgaactgcgcggcgtcaccccggtgtggaacagtacggaggcgctgatcggcgccgcgcgtggcggtgaggatgcactggcggtggaaacgttgcaggtcttctgtgcgtggcttggcagcctggccggcgacgcggcgatcgccgtcggcgcgcgctcggtgtacctggccggtggcatttccgcgcatgtgcaggatttcctggccgatggccgcttccgtgagcgcttcctcaacaagggcgtgctgaccgaggtgctgcgccaggtgccggtgtggcgcgtggagcatggccagctgggcgtgcttggcgcagcggtctggcacgccgcacggcagcccacgcacgactgatcggcagggttggcatcgggccggccgtgcattgcagactgggaggggaaaatggtggatcgcaggcagttcctgcaggccggtgcactggccgcaggcatggcggcattgccgggcgtgcaggcgcgcacgcagggtggggcccgggtggtctccacctgggacttcggcgtaccggccaaccaggccgcgtggaaggtgctggcgcagggtggcagcgcgctggatgcggtggaggcgggcgcacgctgggccgagagcgagctgtgcaaccctaccgttggccattgcggcaatccggatcgcgacggcgtgctgagcctggatgcgagcatcatggacggcgatggccgttgtggtgcagtggccgcgctggtggacatcctgcatccggtgtcggtggcccgcaaagtgatggagaacagcccgcatgtgctgctggtcggcgagggcgcgcagcagttcgcggtgcagcaggggttcgagcgcaagcatctgctgacgccgcaggccgaagcggcctggcgcgagtggctgaagaccgagaagtaccagccgcagatcaatgccgagcgccgtggcattcccggcaacagcgacaaccacgacaccatcggcatgctggcactggatgccaagggccagctggccggtgcctgcaccaccagcggcatggcgtggaaactgcacggtcgcgttggcgacagtccgatcatcggcgccggcctgtacgtcgacaacgacgtcggcgcggccactgcttcgggggtgggtgaagagatgatccgcaacgcggcttcgttcctggtggtcgagctgatgcgccaggggcgttcaccggcgcaggcctgccgtgaagccatcgaccgcgtggtgcgcaagcgcccggaagcgagcagaacgttgcaggtgtgcttcctggccatgaacaagcagggcgaggtcggcgcctatgcgctgcatcgtggcttcgtctatgcggtgtgcgatgcgcagcgccaggatgacctgcgtgactcgccgtcgatctacacgagcacccaggcgtgagtacgcggctgaccctggagatcgccagcaactcgctggcctcggcgctggccgcgcaggctggcggcgccgaccgcatcgaactgttcgacaacctggccgagggcggcaccacgccgtcgttcgccagcatcgcgatggcccgcgagcgcctgtcgattccgctgttcgtgctggtgcggccacgcccgggcgacttccactacgacgcgctggaaaccgaactgatgctgcgtgacatcgcgcagtgccgcgcgctgggttgcgatggcgtggtgatcggcgcgctggacgtgcagggcggcatcgacctggcgctgtgccgggaactggtgcaggccgccgggccgttgcaggtgaccttccatcgcgccttcgacgccgcccgcgatctgccggcggcgctggagcaggtgatcaggctgggctgccagcgcgtgctgacctcgggcgggcaggccagcgccgaggccggtgccgatgtgctggcgggcctggtcacccaggcggcggggcgcatcacggtgatggctggcgccggattggccccgggcaacatcgcaaccgtcgcgcggcagaccggctgtaccgaactgcacgcctccgcaaaaggcctgcgccgctcggcgatgcagttccagaacccggcgctgcgcggtctggacccggactggagccagaccgccaccgctaccgtggccgcgctgcggcaggcgctggacggctgatcgaatccgtcgggcatggcccggggtcagatcccttctgcgaagggatctgacccctgtcgcaaccccggccgcaggcacgcgacggacaaaaccgttccgcgcgcggttgtcgtgatcgtgtcactacttcgtgcgccgttctctcagcgatgtttcgcaactttttgattgttctggacaccggcagccgatagcggcaatccgccggctgttgctgcgttgccgcatgccgggcgtggttcagctgtgctttagtttggatcgatccacaggggaggtgccatatcggtcgtgaaccgatccaagcgcctggatccgtcgtagtgccgcgccaccgtccgcccgtgcgtccacatcttcgaagagcaaccacccatggctcagatcgtccacaagcgtcgccacctgctgtcccaggccctgatcctggccctgttgccgctggcagccagcgcgcaggaagctgccagttcgtccaccaaggatctggacgcggtcaccgtcaccggctcgcgcatcaagcgcgccagcgtcgagggcccggcgccggtcaacgtgatcaccgccgcgcagatccagaaggaaggctttgtcagcgtgtacgacgcgctgaagaccctcaccgaggccacaggcaccgttgaagccgcatcgcaatggggctcgcatacgcccaatgccagcggcctgaacctgcgcgggatgggcccgaaccgctcgctgctgctggtcaatggccgtcgtgtagcggattacccgctgccctacggtggcgaaaccaacttctccaactacggcaacattccggccgcggcggtggagcgcattgaagtgctgaccggtggcgcctcggccatctacggttcggatgcgatcgccggcgtggtcaacgtcatcctcaaaaccaactacgacggcgacgaagtgcgcgtgcgcggcggcacttccagcgaaggcggacgtgatacctgggatctgtcctgggccggtggcaagaccggcgaaaactggagcgtgacctacgcgctgcagtacaccaagcgcgacccgctgttcgggcgtgatcgcccgcagatggacgatgccgacgatgcgccgtacccgtcctggaacatggaacaacgcaaggtcggcttccgtcccaccgccggtctggcgctgatcgatccgaccacgggccagcgcctggcgccgcccaccggcacctgcgaaaaattcgacggcgagtactacaccgccgatcgattggtctacaactacgccgccaaccgcatcaccaacaccggccgcctgtgcggcatgagcgccgactacgccaactggctgcttaccggcggcgccgagaacgtgtccggaaacctgtacgccaccttcgatttcagcaatgacctgcaggcctggaccaacctggcggtgtatcgctccgaagcgatctggggcaccaatccgcccggcgtgtcgctgatcgacgatgacaacggctattactgggatgccaaccgcaaccggccgatcctgggcgtgcgccagttcaccccgaacgaagtcgggggcctggatacgctgcgcaacaccaaccgcgaactgtcctgggactggagcgcgggcctgcgcgggcgcttggccgaccgttttgactggagtgccacggtggggcgttcctattaccgcgtggaagaacggcagaacgtggtcgacaagcagaagtcgtatgactacttccttggcccgcgcctgggcaccaccgccgatggcgaggcgatctatgcgttgaacgaatcgcgctggtggaacccgctgacgccggaccagtactggcagatggggaccgtggcgaagaaccgcgcggcgtcatgggtcaaccaggcgtcggcggatatcaccggcgagctgttccagggctgggccggcccgatttcgtttgcggcggtggctgaagtcgcgcagcagggctatcacctcagtccggacccgcgcgctggcatcgacttcgacctgcagaatgtcgatcgcggcggcggtgagcgtacccgctactcggccggcgtcgagttcaagatcccgctgttggacagcgtgaccgccactgcggccgcgcgctacgaccgctatggcaactacaaggccgatgacagcagcgaagcgctggacatcggcagccagaaggaaaccacctggaacgtcggcctggaatggcgcccggtcgaatcgctgctggtgcgtggctcatacgccaccagcttccatgcgccggacatgcattacctgctgggccagccgagcagttcggaagtgcagacctatgaccgcctgcgctgcatccagagcggcgcgtacctggtcaacaactgtggcgtgggcaacaccgacgtctggtacacgttcgacgtgaaccggcgtgggacgccgctgctgcgctcggagaccggtgattcgtggacggtcggcttcgtctgggacgtgctgccgaacctgtcggtcagtgccgactactgggcgatcaagctggaagacatgatcgtcgacgtcggcgccgatgaggtgctggccagcgaggccggctgcctgaccggcaagaacatggacggtacgccatgggccaacccggccggtggcgagtactgcgccggcatcctggcccgcgtgaaccgtgacagcaacggtcgcctggtatcgatcgagcgcggcccgttcaacctggccagccgcgaggtgcgcggcatcgacctgaccgcgcgctatcgcctggaaaccgcgcggtggggcagcttccagctgggcgtgaactacaccaaccagatctcgaccaaggagcaacgctacgccgccgacccgaatccggaacgccgcgatcgtgacctgcgcagcaagctgcgcgcgagcctggcctggcagcgcggcaactggaacgccaacgtctatgccgaccgcatcggttcggtgccgggcgtgcgctaccactggggtaccgaccgcctggacaaccctggtggctgcctgccgttcgccgatggctacgtgcccagtgacagcccgtcgctgaactgcctggagccggcacggctgccggatggttcggtgaacccgaaccccaacgccgggcagcagacggcgcgctactacggtcgagtggggccgttcatcacctggaacttcaacgtgggctaccaggtgaccgaacacgcgaaggtaaacgtgtacgtcaacaacgccttcaacgccgccagctggaaccacaaggacccgtacaagctggattacgacttcgctccgacccgcctgctgggcgcggtcggccgcgagttcgcgttggagtatgtgttcaccttctgaggtgacctgcctccgccggtaggtccacgccatgcgtggatatggacacccgggtgcccattcaggaactgcggacaggctggatttgaccttcccacgatggcaaggtttagcctgtccgcatccagaaggagccccgggaatccgatcatgagcacgccccgcgccactgcagcccccgcaagccctgccaccatcagcctgcccatcgagggcatgacctgtgccagctgtgtcggccgggtcgaggcggcgctgtccagggtcgaaggtgtgggcagcgtttcggtcaatctggccactgagcgcgcggatatccgcccgtccggtccggtcgatcgggccgcgttgatccaggcggtggagcgggtgggctacgacgtgcccgctgccaccaccgagctgtcggtcgagggcatgacctgtgcgtcctgcgtgggccgagtcgaacgtgcgctgttggccgtgcccggcgtcagccaggccagcgtgaacctggccacggagcgcgccacggtgcgtggcgtggcagaagttgcagcgctggtcgccgcgatcgacaaggccggctatgacgcacgcgtgattgaagccggcgtgcagtccgatgacgaggccgcggaaaagaaggatgccgagcgcgccgaactgaagcgcgacctgatcgtggcgtccgcgctggcgctgccggtgttcgtgctggagatggggtcgcacctgatccccggcatgcacgaatgggtgatgtccaccatcggcatgcaggccagctggtacctgcagttcgtgctgaccgcgctggtgctcgccatcccgggccgccgcttctaccagaagggcatccccgcgctgctgcggctggcgccggacatgaattcgctggtggcggtgggcactgccgcagcgtttggctactcggtggtggccacgttcctgccgacgctgttgccggcgggcacggtgaacgtctactacgaagcagcggcggtgatcgttgcgctgatcctgctcggccgcttccttgaggcccgggccaagggccgcacctccgaggcgatcaaacgactggtcaatctgcaggcgaaggttgcccacgtggtccgtgacggccggacggtggatgtcccggtcaatgaagtgctgagcggcgacgtggtggaagtgcgcccgggcgagcgcgtgccggtcgacggcgaggtggtcgagggccgcagctacatcgacgagtcgatgatcagcggcgagccgatcccggtcgagaagcagccgggcagcagcgtggtgggcggtacggtcaaccagaagggcgcactgacggtacgtgccacggcggtgggcgcgcagaccatgctggcgcagatcatccgcatggtcgaacaggcgcagggctcgaagctgccgatccaggcggtggtcgacaaggtcaccctgtggttcgtgccggcggtgatgctggccgcgctggcgaccttcgcagtctggctgatcttcgggccctcgccagcgctgagcttcgcgctggtcaatgcggtggctgtgctgatcattgcctgcccatgcgcgatgggactggccacgccgacctcgatcatggtcgggaccggccgtggcgccgagatgggtgtgctgttccgcaagggtgaagcgctccagttgttgaaggatgcacaggtggtggcggtggacaagaccggcacgctgaccgaagggcgcccgcgcctgaccgatctggagattgctgccggcttcgatcacaacacggtgctggcggcagttgccgcaacggagtcgcgctcggagcatcccatcgcccgcgcgattgttgatgccgcgaccggccagggcatcgcgttgccgggcatggtcgacttcgaatcggtcaccggcatgggcgtgcgggccagtgtcgagggtgcacgcgtggaggtcggtgccgatcgcttcatgcgcgacctgggcgtggacatcactttgtttgcgacgctggcggcagagctgggcatccagggcaagtcgccgctgtatgccgccatcgacggccgcctggccgcaatcatcgcggtatccgatccgatcaagccgagcacgccggccgcaatcgcggcactgcatcagcttggccttaaagtggcgatgatcaccggtgacaacgctggtaccgcgcaggcgatcgcgcgccagctcggcatcgacgacgtggtggccgaggtgctgccggaaggcaaggtcgaggcggtgcgccgcttgaaggccacacatggccatgtcgccttcgtcggcgacggcatcaacgatgcgccggcgctggccgaggccgatgtcggcctggccatcggcaccggcaccgatatcgcggtcgagtcggccgatgtcgtgctgatgtcgggcaacctgcagggcgtgccgaatgccattgcactatcgaaggcgacgctgggcaacatccgccagaacctgttctgggccttcgcttacaacaccgcattgattccggtggcggccggcgtgctgtatccggtctggggcgtgctgctctcgccggtgttcgcggccggtgcgatggcactgtccagcgtgttcgtgctgggcaacgcgctgcgcctgcgccgcttccagccgccgatggcggacgcccccgccgcgatccattgagggagaaccgcatgaatatcggtgaagccgccaaggcctccagcgtgtcggcgaaaatgatccgctactacgaacagatcggcctgattcctgcggctgatcgcaccgagtcgggctaccgggcgtactcgcaggcggacatccaccgcctgcgcttcatccgccgcgcgcgcgacctcggcttccaggtggccgagatcaccgatctgctgggcctgtggaacgacacctcgcggcacagcgccgacgtcaagcacctggccgaacagcacattgccgacttggagcaacgcatcgagcacatgcggcagatggccgacacgctgaaatcgttgatcagttgttgtgcgggtgacgagcgcccggaatgcccgatcctggagcggttgggcgaagaccatgatgccccggtgccggtcgtcgccgccaagaccggcgcggtgcggcgacgcgcacagaagtattgaatcgatatcgcgtgcactgaaaagcccgccctgtgacagtgcacggggcgggcttggttctggatgcagtgcagggaatcaggcagtgcgaggcgggaagccggcatcgttcaccgcggcgaacacctgttcctgcgacgcggtggtctgcaccttgaccagcccggtcggcggatcggccaccacgctggcgttcggatcgatctgctggatcgcacgggtcacgctgcgcgcacagccgccgcaggtcatgccgtcgacatggaattccatctgtagctccttcgctgctcttgggatgaggccagtgtgcaccttccaacgatggcagggtcaagcgtcgggctgaacgacgaacaaggcgcggacaaaaaaacggcagccacctgtaccagcgcggctgccgtggaggaacgtccccgccagggcagggcatgggttgcgccgggacgtgcccggccaacccggtgcgggcttagaacttccagttcacgccgaagtacaactggcgaccggcgtacaggttggacagcaggcgggcctggctgtcgttgccgatgtagctgcgcagctcggacttggtggcgttcagcacggcagccgtcaccgtccagtccggggtcaggttgtaggccacgttcaggtcaagctggctgtacggcttggtgtaggtggtcatgccattgttcagcccgccgaccacttcaccgcgacggttgtacgaggcacgcgccaggaacttgtcgttctcgtagaacacggtgacgttggcctggttcttggcgctgccgaccagcggcgatgagccgatttcctcgccgtccagcacgatcgaggccaggttggtgtcgttgtaggtgtagttggcctgcacgcccagaccgaagtcgaaggtgtactggccatacagctccacgccctgcgaaacgccatcgcggccgttggcctgggtctcgtacttctgcacggtgaccgactgcccgccgacgttcatctgctggtcgcgcaccaccggcacggtgaagttgtccacgttcttgcggaacagcgaaacacctgcgaccgcgcccggctggaagtaccactccaggcccaggtcgaactggaccgccttgaacggctccagcgccttgttgctgcccgagccgtaccagccgggcgtgtcggtgccgccggtgacacggcgatcgttggcgtactcctcgctgatgtaacgcaggccaccgggataggcgatgctggtgtagctcgggcgcgcgaccaccttcgacgccgcaccgcgcagcaccaggttgtcggtgatgtcccaggcaatgttgaagctcggcagcacgtcggtataggtcttctccagcgacgacagggcgtacaccttgtcgcgcacctgggcgtcgggcaggcggacgaagccaccctggcagcgcaggttcggatcggcggccggatcatcgcagctcatcggcgcgccgctggcgttgtcgacgaagtagtcgttgaagcgctcgaccgagtcgctggactgggcgaactgcttggtgcgcaccacgcgcacgccgacgttgccgcgcacgcgctcggtgcggaagttggcctggaagtagccggagtagatcttctcgttgacgtcgtagacgaagtcttcctcggtgcggttgtgcgagccgccgtaggtcttgttcaggtaatcgatgtaggccgggtagttgatgcccgggaacacattggcgttgaaggcgccggtgatgttgctgatcgggttggacaggaagaagcccggctgcgcgttgccagcggtcggatcgcaacctgcctggtaacggttgttgtcatagtcggacgggtccaggcccgggcacacccagtaggtgttgccggtgttgcggtggaccttgccgtcgcggtacttggcaccgaactggatcgagtccagccagccggcctcgaacagcttggtgacgtctgcctggaagtagttctgcttgacttcggtctgcatccacgacgagtcggtggaaccggtatcgacttcggcgacgccggccatcagctgctgctgcaggtcgggagagaactgcaccgacggcgtgccggtgaggtcccacgcggtgtactggttgccggactgccactggttgcccaccttgcggcgcggcttggccgacatgcggaagttcatcgacggaccaccttcggaccaggtgcggccgccggtgaacgaggctttccagagggggctgatgtcccagtcaatggtcaggtccgcggtctgcgacagtgccttttccttgctgtagccgccggtgagctgcggggtggggatggtgcagtcgtccgggccccagccaccgggcttgaggccggcggcagccgcttcatcctcgctgcagtagtaggtcttaccggccagcttctggtactgcgcgccggtgacgatgctgccgctcggatcgaagtccaggccattgagcaggcggccgccggcccagttgccgtcctggttgtagcgggccaggttccactccggcaccttcagcatgttctgggtgtagtcaccctgcagctcgaagcggaagtagttggccgtcatcgtgacgttgtcgaccggcttgaactggaaggtcagctgcccgcccttgcgttcgcgcttctcttccttcaccgcgaagttcaccgaggtcggcatgaagaactcactgtagttcttgccggtctggttgttgaaaccggactcgccccaccagtagtggatgccatcctgctccagcaggttgccgttggcatcgcgggcggtggtgccgttgccgtaccactggtagtcctcggtgctggcctccatggtgcgggtagtgcgtttctgctgggtcacgcctaccagcacgccgaagcgctcgtccttgctgtgccaggaatacagcgccgacacctgcggatcgacgtcgtggctggtgtctgaggtggtgccctccaggttcacgtagccggagttggattccatgtcgagcggacggcgggtatgcaggatgaccgtgccgccgatgccgccttcgtcgatgcgtgcttccggcgacttgaacagctcggcgctggacagcatgttcgacggcagcagggtgtagttgaaggaacgggtggcttcgttgttggtttccgaggaggcgacgaagttgccgttcaactgggtcagggtcaggtccggtgcaaggccgcgcacgctgacgctcttgccttcgccaccgctgcgggtgatgaccacgccgggcacgcgctgcagtgcgtcggccacgttcttgtcggggaacttgccgacgtcttcggcggtgatcacttcgaccacggcgttggcatcgcgcttctgctcaaggctcttttcgatggcgtagcggtagccggtgacctggacgctgtccagagtcgtggcgtcctgcgagccggtggtcgtggcctgctgcgcggcggcgcctgccggaatgacggcggcagccagggccagcgcgatggccagcgacaatgcgtcctggccgtgcgtacgtgttgaatgcttcattcccatctctccctctctcctggattgatccggtgacgtggcacggacaacttgaatcgatctaatttgaagtgaatttgtcgctgtcgccatgcagtggcagtagcaccgcacgcgtggcctggtgtacgtcctgttgctgctcccccaactcccggccatcgcagcgtcgtcttggatcgatctaagcgatgggcgggcgatttttagcatgggtcgcccttgggcgcatgctgctccgcaatatggtactggcgtggcgtagggatgacggtttgctgaaatcagtgaaatcgttttcgtgcgcagggaggggggggcggcagggctgcgccctgcacctgcgggtagtgccggccgctggccggcaagagccaaagccaaagcggctctgggttgtctgggtttggcggtgcggtgtggactggcaggacacgccgtaaacccttccatgggggctcgatggcgccatccatggcgccaacggtcctgccagcccacaccgccccacctttgacagtttcccggtgacggttggactgatcctggaacgacatggggtcatggggtcagatccgttttccgttggaaaacggatctgaccccggattgatttcgatatctgacagagattcatccacgcatggcgtggatccatccacagatcgcggaaatctgtcgaaggcggggtgggtccggttgcgggggtgtccgcggcatggatgccgcggccaagcccccagggatgggtttacggcgttcctcgcaaccggacccaccccgccattccacggatcgccggcttttgctgttgcttcggctgttgcttctgaggttgccggccagcggccggcactaccgcaggtgcagggcgcagccgtgccgaatacaccctcatgctgcgccgcagaatgcattcggctgaacctgcatgctctacttgaatcgatctaaatccacggtcacgtgggtcgggcgtcattccagggggagccttctgccggtccaggcagagctcagcggaacggtgccggaaggcccgggccgtctgtctctgcgtcatcgactacaggaacccgacatgcgtccagtgccgtccgctcccgccgtcccatcatcctcgcgcccgctggtgcgcctggcctgcctgcttgcgctgtcggcggcgccgatgctgctgcaggccgcgccggcagcgctggagcgcgaggtcaacaccttcatcggcagcaaggacgacggcaacacgttcccgggtgcgtcggcaccgttcggcctgatccaggtcagcccgatcggcagccactattcgggttggcgctatgacgacgagaagatccgtggcttcggccactccttcatctccggtgccggctgctgggaacagggcggccaggtgtcggtgctgccggtcacgggctcgatcggtccgggcggtgatttcgataccggcaacgccaggcagttcgaccacaaggcctacgccgcgtcctacacccacgatggcgaggtcggccaggccggctactacaaggtgcggctgaccagctacggcggcatcgatgccgaggcgaccgcgcgtacccgtgccgcggccgagcgctacaccttcagccagcgcagtggcgatggccacgtgctggtcaatgtcggccaggccaacgagcgccattcggtgatcggcagcgtggtcgatgtggtcggcgaccgcgtggtcgagggcaagctggtcaccaagagtttctgcggcggccatcagtacaccacctggttccgcatcgagttcgaccgtccgttcaaggcgcatggcacctggggtgagggcggcggcctgccgggcgcgcgccacagcatggaaggcgagcagaagccgaacggtgcctggctcagcttcgacctggccaagggccagtcggtgacggcggtcagcgcgatctcgcacgtggacgccgaaggcgcgcgcaccaacctgcgtgccgagggcatgcagggtgggtcgctgctcggattcgaccgcatgcgcgcgctgtcgcagcaggcctggcgtgagcagcttggccgtgtacgcgtgcagggcggcaccgccgatgaccgcaccgtgttctacagcgcggtctaccacgcgctgctgcagccgatgaccggcaacgatgccgatggccgctaccgcggctatgacgatggcatccaccgtgccgaaggctggacctattacgagtacttctcgctgtgggatacctaccgcgcgcagaaccagtggctggcactgacccgcccggacgtggcgcgcgacatcggccgcaccctgctggcgatcgatgagcagggcggttggctgccgcgctggggctatgccaacttcgaaaccaacatcatgaccggcgatccggtcaccccgttcatggtcgacctgtggcgcttcggtgcactcaagggccgtgaatcgcaggcgtgggatgcgctgcgccgcaatgccttcggcacgccgccgctgaactcgcgcatggccggccgctccggcaacccgacttacctggacaagggctacgtggcctatgaccgcgcgttcccgtccaagggcatggacgtcgatccgcaccacggtggttcggccacgctggagtacgcgctggccgattgcgcgctctcgcagatggccgacggcctgggccatgcccaggatgcggcgacgctgcgcgagcgcggccgcaactggcgcaaggtgtgggacccgctggtgcgcgacgccgagaccggcttcaccgggttcccgcgcccgcgtaccgaggacggccagtggtacaccccgtccgacggccattacagcccgcgttcgcaccacggtttccacgagggcacggcgtggcagtaccagtggctggcgcagcaggacgtgccgggcctggtcgaagcgatggacggccgcgagcaggcgggccgccgcctcgatgcgttcttcgcgatggacgcgctgcaggccgatccgctcaatgccgcccgcaaggcgtgggtggtcgggccgtacagctactacaaccagttccgctacaacccgaacaacgagccggacctgcactcgccgtggctgtacacgctgatcggccagccgtggaagaccgcggccgtggtgcgtgcggcgcagcagctgttcaccaatgcccccaacggtgtgaccggcaacgatgacctcggcacgatgtcggcctggtacctgttcagtgccatcggcgtgtacccggcggtgccgggcagcggccagttcctgctgcacaccccgcgcttcagcaaggtggaagtggacatgggcaatggccgcaccctgcgcatcgacgcgccgggcgccgatggccgccgcctgcagtatgtgcagggcgtgcaggtcgatggccaggcgcatgcaccggtgtggctggactggaaccgcctgcagcagggcccgcgcgtgcgctttgcgctggatgcgaaggtgccggagcagggctggggcacggcggtgaaggacctgccggtatcctggtgcgcggcaccgggcagccagctgcgctgagccggactgtgccgttcgcggtgacccagcgaacggcacggcacgacacggccctgatccattaggcttgagcttccagcggagtccgggaagacgatgaacgacaacggcagcagtcccagcaagcgcgccggcaaggcggtgacggtgaccgacatcgcgcgtgcgatcggcgtgtcacgggcaaccgtgtcgctggtgctgcgtggcagcccgctggtcaatgtcgatacccgcgccaaggtcgaggccgagctgcgccgccagcgctatgtctacaaccgcgcggcggccaacctgcgccggcgcacctcgtcgagcatcgcgctggtgatcaacgacctgtccaacccgttcttcgccgaattcgcgtcaggcgtggacgaggcgctgggcgggcgcggttacgtgacgttgctgggcagcaccggggaatcgccagagcgccagcaggccgtgctgtccacgctgatggagcacaccccggccggcctgatcctgtcgccggccgagggcagcgacaccgcgcagttgcggcaggcgctgggcgccaatgccaacgtgctgctgttcaaccgcgaactggccggggctgactgggacttcctgaccctggacaaccagcacggcgcctatctggccacgcgccacctgatcgagcgcggccatcgccagatcgccttcttcggcggccacgccgcatccagttcctgccaccagcgccgcgccggtttccagcaggcgctggccgaggccgggctgtcgctgccgccgggttggatgatcgagtcggcgccgaaccgcctggaagcagcagcgcgcaccgatgaactgtttgccgatggccatcgtccgagtgcggcggtctgctacaacgacaccgtcgcgctgggcctgatgctgggcttgaactcgcgtggcatccgtcccggtggcgactttgccgttactggtttcgacgacatttccgaggctgcggtggcggtgccaccgttgaccacgctcactgccgacccgcgcgagcgtggccggcaagcggccgcgctgctgctgcaacggctggacgaaccggatgcgccgccacggcgcacggtcgcgccggtgcagctgcgcatccgcgaaagcagtgctgcgcgaccgaactgattcctttcatacaccccttccacgcaacaacgaccttccgcgcatcgaggcgcgtaccgcatgccgatctccgcaacgccccgtccatcgggttcctcgggcaacgcacccgccgtcaccaacggcaaggcgttggctgtcgtcaccacgatcttcttcatgtggggcttcctgacctgcctcaatgacatcctgatcccgcacctgaaagcggtgttcgaactgaactacgccaaggcgatgctggtgcagttcaccttcttcggcacctatttcctgatgtcgctgccggcggggcggctggtggcggcgctgggctacaagaagggcatcgtcgccggcctggtgatcgccggcatcggcgcgctgggcttctggccggcggccgaactgcgcgtctatggcgccttcctcggcgcactgttcgtgctggccaccggcattaccgtgctgcaggtggccgccaacccctatgtcgcgctgctgggcccggagcagaccagctccagccgcctgaccctggcgcaggcgctgaactcgctgggcacggccatcgccccgatcttcggcggcatgctgatcctgtccaacacggtcaagagcgctgacgacatcgcggcgctgccggccgccgagcagctggcctaccgtgccgccgaggcgcaggctgtgcagggtccgtacgtgggcctggcggtggcgctggtgctgctggcgctgttcgtattcctgttccgcctgccggcgctgagcgacgccaccgagcaggccgaccagggccaccaccacagctacctggatgcgctgcgcaagcgccacctgctgctgggcgtgctgggcatcttcttctacgtcggtgctgaagtgtcgattggcagcttcctggtcaactacctgtcgatgccgaacatcggtggcttcagcgagcagcaggccacgcattacgtgtctgcctactggacgatggcgatgatcggccgcttcgccggttcggcgctgctggcgcgcttctcgcccagccgtctgctggcgatcttcgcgctggtcaacgtggcgctgctggtcaccaccatgctgacctccggcaacgtcgcgctgtactcggtggtggccatcggcctgttcaactcgatcatgttcccgaccatcttcgcgctgagcatcgagcgcctcggcccgctgaccaacaaggggtccagcctgctgatcatggccatcgtcggcggtgccgtggtgccgtacctgcagggcgtgctggccgaccacatcggcgtgcaggccagcttcatcctgccgctgctgtgctacggctacatcattttctacggactggtcggtgcgcgtacgccggcctccgcaacgcagggaggctgagtccggaatgggtgccatcgtttgcttcggcgaaattttgatcgatctactagcacagccgccggcctcggccgacaccccgcgtgcgttcctgcagtacgccggtggggcgccggccaacgtcgcggtggcggctgcgcggctgggtgcgaagacccagttcgtcggcatgctgggccgtgacatgttcggcgacttcctggccgacagcctggtcgagcacggcgtgggtaccgattacatcgtgcgcaccgacgcggccaagaccgcactggccttcgtggccctggatgccaatggcgagcgcagcttcagtttctaccgcccgccggcggctgacctgctgttccgtgacagcgacttccaggcggcgtgcctcgacagcgcgcaatgcttccacgtctgttccaacagcctgaccgagccggccatcgccgaggcgacctttgccggcatggaccgtgcccgcgctgccggtgcggtggtcagcctggacctcaacctgcgtcctgccctgtggccggcgaacgaggacccgacgccgcgcctgtggcaggcgctggaacgcgccgacctggtcaagctgtcgcgcgaggagctggactacctggccgcgccgctgggcgccgatggcgaggcggcggtgctgcggcgcctgctggccgcgcgggcgcgctgggtgatcgtcaccgatggtgcagccacgctgcactggtacacccgcgacaaccacggcacggtcaccagcttccgcgtggccacggtcgacaccacggcggccggtgatgccttcgtcggcggcgtgctggtcggcctgctggagcgcggcggggccggtgccggttttaccgccttctgccaggaccccgatgcgatcaccgccacgctgcgcttcggcgctgcggtcggcgcgctggctgttacccgcaagggcgcgttcgccgcgatgccctcgctcgatgaagtgcagcagctgctgcaggcacaggacattactgcatgagcacctcgcccgatttccgttcgcccgcgttcctgcgcgcgcacatcgccgataccatggcgttctaccacccgcgctgcatcgatcccaacggtggcttcttccactacttccgtgatgacggcagcatctacgatgccagccatcgccacctggtgagcagcacccgtttcgtcttcaactacgcgatggcctaccgcgagttcggcaatgccgagtaccgcgacgcggtcgagcacggcgtgcgctacctgcgcgaggtgcaccgcaaccccgccaccggcggctacgcctggaccctgcgtgatggcaaggtcgaggacgacatgaaccactgctacggcgtggccttcgtgctgctggcctacagctgcgcgctgaaggcaggtatcgagcaggcgcgcgcgtggatggacgagacctggcagctgctggaagcgcgcttctgggagccgcagcacgggctctacaaggatgaagcggacggccagtggaacttcaccggctaccgtggacagaacgccaacatgcacatgtgcgaggcgatgctggccgcgttcgaggccagtggcgagcagcgctatgtggagcgcgcgctgcagctggccgacaacatgacccgccgccaggcggccaaggccggcgggctggtctgggaacactacgatgagaactgggagatcgactgggactacaacctggacgaccccaagcacctgttccgcccgtggggcttccaaccggggcaccagaccgagtgggccaagctgctgctgatcctcgatcgccacgtgcaggccgactggctggtgccgaccgcgcagcacctgttcgacgtggccgtggcgcgcagctgggacgaagcgcgaggtggcctgtactacggcttcgcaccggaatcgcgccggcagccgggcatggatggcgcgccgatcggtggcgacagcttcgtctgcgacgacgacaagtacttctgggtgcaggccgaaacgctggcgaccgccgcactgatggccaagcgcaccggcgatgaccgctactggcagtggtacgaacgcatctgggcgtattcgtgggaacacttcgtcgaccatcagttcggcgcctggttccgcatcctcgatgccgacaaccgcaagtacagcgacgagaagagcccggccggcaaggtggattaccacaccatgggcgcgtgctacgaagtgttgaacgtggtgcgttgaggcgcgtgtcgccatacggatgatgaatcggaatcagtagcgccgggccacgcccggcggaaaaacaggagctccgcgtgcatcgtctttccctcgttgtccgtctgctcctgctgctggtcgcaacgtcggccttcccggcaattgcagcgcctctgcaggcacagtgggagttccgcatgctgcccggcgacgcgcagggcgccgcccacccaggcctgcagcaatggcgtgcggcaacggtgccgggcagcgtgcacaccgacctgctggcgcatgcgctgatccgcgacccgtacgtgggtgcgcccgaagcggagctgcaatggatcggcctggcggcctgggagtaccgcgcgcgcttcgacgtggacgcggcgatgctggccaagccccatgccgaactgcgcttcgacgggctggacacttatgccgaagtaagcctcaacggcaagccgctgctgcgcgcggacaacgcgcaccggacctggcgcgcgcgcgtggaagggcatctgcgcgccaggggcaatgaactgcagatcgtgttccgctcaccgatccgcacgctgcttccgggcgtacaggcgatgccacacaggatcgctggcaactacccgtcgccgtatggcgatgagccgaaggacgcgatggtcggaaacttcgcgcgcaagccggcctaccacttcggttgggactggggcccgcgttatgtcaccgccggggtctggcgcggggtcgacctgcaggcctgggatacgcaccgcctgaccagtcttgccgtgcgcaccgatgcattgagcgcggagcaggcgaagctggcggtgctgctgcaggtggagcagggcagcgccaccggttctgcggtcgtcaatgtggaagtcctcgatccgcagggtcgcagcgtggcccagcagcagcgcaccgtactgctgaagcccgggcagaacagtgttgaactaccgattgaactggcggaaccgaagcggtggtggccggtcggccatggtgcgcaggatcgctataccgtgcaggcgcgcctggatggcggtgccgacgcaacgctggtgcgcgagcagcgcatcggcctgcgcacggtcgaactgcgccgcgaagaggacggcaagggcgggcagggcttcgccttcgtcatcaacggcgtgccgatcttcgccaagggcgccaacgtcattccgttcgatgccttccccgcacgcgtcgacgcagcacgtctgcgccaggtgctgaccgccgcgcgcgacgccaacatgaacatgctgcgcaattggggcggtggctactacgaggacgacgcgttcttcgacatcgccgacgaactgggcctgctggtctggcaggacttcatgttcggcggcggcatgcagccgggctacgatccggccttccgtgccagcgtggtggccgaggcgcgcgacaacgtgcgcaggctgcgccatcaccccagcatcgtgctgtggtgtggcaacaacgaggaagaaaccgcctggaaggactggggtcacggccgcgacctgaaggcggccgacccggcatttgcggcgaaggtctggcagggctatgtcgacctgttcggcaacgacctgcgccaggtggtgggcgaggaaggactgggcgtaccgtactggtccagttcgcccagcaacgatctggacgagaaggccaacgattccacccgcggcgacaagcactactggcaggtctggggcaatccggcgctgccggtgcaggcctacctgcgtgagacgccgcgcttcatgtccgagtacgggctgcaggcgtggccgtcggtggcgacggtggaccagatcgccacccgcgccgaacagcgcatcgacagcccggtgatccgcgcgcaccagaaattcatggccggcgagggcaacagccgcctgctgcactacatcgaacagggctatggcacgccgaaggacttcgaggacttcgtctacctcagccaggtcatgcaggccgatggcattgcactggcggcgctgcatcatcgcgcctcccggccatacacgatgggttcgctgtactggcagctcaacgatgtctggccaggcgcctcgtggtccagcgtggattacttcggccgctggaaggcgctgcacttcgccgcgcggcgcttcttcgcgccggtcacggtagccgcgctgcgcgatgagggcagcacgcgggtacgcctgatcaatgacggtgtggcgctggatgcacgttggcggctgcgggtgatggacgtggaagggaaggtgctgcgccgtcgcgaggatgcggtgacgctggcggcgtcgggcgtcacctcgatcggtgattttcgcgatgccgagttgctggccggtgccgatccgaagcgcacggtggcggtgtttgagctgctgcagaacggggcggtgagcgcacggcaggtggtcggattcgtcgaagccaaggaccaggtattgccgcggcagaagctcaaggccaccttgtccatcgaaggcgaccactatcgactgcggctggaaagcgcggcgtacgtgcgcgcggcgtggatcgacttcggcgcgctggacgtgcaggtcgaagaaaacctgctggatctgctgccgggcgaaacccgcgatatcgcggtgcgcggcccggtggatctggttaccctgcgcgaggcgctgagggtgaagaccctcaacgaccgttgagggatatcccgctttggtaggtgccaaccttggttggcacaccaggagcctgccaaccttggttggcacaccaggagcctgccaaccaaggttggcctctaccattttgcttacagctggatctgctggaagttctcgacccgctcgtggccgttggcggactggccggtacgcggcatcgggtagtcatccaggcggtcgatcagacgggtctgcaggccggcttcgcgggcagcatccagttcttcgaccacatcggacaggaacaggatctcgccggccggcacgccaatggcctgcacgatgcggcggtagctgtcggcctcacgcttgccacccatctcggtatcgaaccagcccgacaccagcgggctgaggtcaccggcatcgctgaagccgaagaacagcttctgtgccggcaccgagccggaggagtacacgtacagcggcaggccggaggcatgccagcccttcagcaccggtgccacttccgggtagaagtgcgcggtgtagtcgccgcgacggtagccctcatcccagatcaggccctgcagcgccttcagtgcggtgtgcttgcggtcctggtcaatccagccctgcagcgtctcggccaccaggctgtcctggcaggcgccgccgatctcggtagccaccgcgtccagccagcggcggacctccggctgctggccatgttcggcgacgaacgcgggcaaggccttgcgggcataggggaacagcacgttcttgacgaacgagatgctgctggtggtgccttcgatgtcggtcaggatgacgcggggctgcatggatcaggacgcctgggtaggtacgtaacgggggaacttctgcgcgatgtcggtgccggtgaaatgacccacccagccgtccggctcggtgaagaagcggatcgccacgaagctcggttcatcgcccatgtcgaaccagtgggtggtgccatcgggcacggcgatcaggtcgtccttcacgcactcgatctcatagaccttgtcacccacgtgcagggtgaacaggcccgagcctgcgacgaagaagcgcacctcgtcttccttgtggaagtgctcgtcgaggaacttcttgcgcagctcggcgcggttcgggttgtccggggcgatcgaggccacgtccacgctcttgaagccgcgctcggcgaccaggcgatcgatgtccgcacggtaggcggcgaacacttcctcctggctggcgcccggcgcgactggcgcggtggcctgccagcgctcgaaggtgacgccgatcttctgcagctcggcagcgatgaccgcgccgtcctgggtgtccagcagcggcgattcggggcgggtgtcgtcgtagatgcgcagtcggctcatggcggcagcttgaacgtctcggggggaagacagggtagcagggtgggggcgaggcgcagattccggatcggcatctgcacctgcgcgcaggctcagccgcgcagcttgcgcagctcgagctcgcagtggaacaggaattcgaaggcttccaggtggcggcgcgcctcggccatgtcacggccccaggcatacaggccgtggccgtcgatcaggtaaccccacaggttctgccggtcgagcaggtcgtcgacctgcgccgagagcacgttcatgtcctgggtgttggcgaacaccggcacgtcgatggccatttcatgggtgctgttgccggcgaaggccttcagcagctcgtagccttccaggcggatatgaccctgcggcgcgtacaggcgcgaagcgatggtctgcaccggcgaatgcgtatgcagcacacagccgatttccgggaagcggcggtacagctgggtgtgcagcagggtctcggcggacgggcgcagcgggcgaccgacggccaggccgtcgaagtccaccaccatgatgtcgtcctcgatcagccggcccttgtccttgccggacacggtgatcgcggcgtggcggtcatccaggcggtgggagaaattgctgctggtggccggggtccagccggcgtgcgccagttcgcggacgttgtcgatcagcagctgggccagttcgctcaggcgcgcggtgtcgtacgggaaggtgggggcgttcatgccggcgattttactggattcggccaacggctgagcccctcgtggcgggtcgtgtagagcggttcatgggcggggcggggcgggtgggccgtgcaggggacgctgcaagtacgtccctgtaagctcgatggcgccatacatggcgccaacgcccctgcacggcccacccgccccgcctcggacaggttccggcgtgcggccagccacggagtgaagaagaaaaagcggaaagcgggtcgcggcgctgggcttgctcggagccgagcatggctcggctctacaggggattcatcgaccggagagaattcatctctcagacgcaattcatccacgcatggcgtggatctaccggacgtgccaggagactgtcggaggcggggaggggggaggttgcgggggcgtgagccgcatggatgcggcgaccgagcttacagggatgtacttgcagcgtcccccgcaatctcccccccctccccgccaaaccctcagcccagctcttgccgtcgctccggcttcaaaggcgggtgcagggccgcaggccctgcaatacaaaaaccccttactgaccccgcaggcggctgtgccggaacccgtagcagaaatagatcacgaagccgacgaacgtccatacccccatcagcatccagttgtgcatcgtcatcgccgacagcagcgccaggcagctcagcacgcccaggctgcagatcagccacgccatcggcatgcggaacgggcgcggcaggtccggctgggtgcggcgcaggatcagcacgccggcgcagactgcggcgaacgcgatcagcgtgcccatcgaggtcagctcgccgaggatgtccagcgggaacagcgctgccagcagcgcgatgccgatgccggtgatcacggtgttgatgtgcggcgtgcggtacttcgggtggatccgggtgaacaccggtggcagcaggccgtcgcgccccatgatcatgaagatgcgcggctggccgatgatcatcaccagcactaccgaagacaggccgaccagcgcaccgacctcgaccacccagcgcagccagcccagctgtgggtgcgcggccacggcagtcaccaccggctcgtcggtgcccagcagctggaacggcaccaggccagtcatcactgcggccattgcgatatacaacacggtgcagatcaccagcgacagcatcatgccgatcggcatgtcacgctgcgggttcttcgattcctgcgccgccaccgataccgcctcgaaaccgatgtaggcgaagaacaccatcgccgcgccacgcagcacgccttccatgccgtacttgcccgggccttcattggccggaatgaacggggtccagttgctggtgtccacgtatttccagccgaccacgatgaccagcacgatcaggccggtcttgagcacgaccatcgccatgttcatcgccgaggacttgctgatgccgacgtagcacagccaggtcagcagcagcaccagtgcggcggcgggcaggttggcgatcgcgccggtggggcgcagctgcgcgtccagtggcgcgctgaccagtgccgccggtagatggatgtcgaactggctgagcaggctgaggaagtagccggtccagctgaccgccaccgccgaggcggagacgccgtactcgagcaccagcatccagccgatgaaccaggccgagagctcgccgaaggtggcgtaggtgtaggtgtaggcgctgccggagaccggcaccatcgaggcgaattcggcataggccagcgcgcagaaggcgcagcagatggcggccagcacgaaggacagcatgatcgccgggccggcgtggttggcggcggcctggccggtgatgacgaagatgccgccgccgatcaccgcgccgatgcccagggcggtcagcccccaggggccaaggtggcgacgcaggctcaggccgttggcgtcttcatgggcggcatgcggatgcttggtggcccacagttgcttgaacatgtatggtggtcttgtcgaagcgcgccatgggcggcgcgcgggaaaacggacgggccggcgcgaggccggcccgaaggcggatcagggcgacttggcgagcttgctgttgcggatgccgtagcccaggtagatcagcaggccgagcagcgtccagccaacgaacaggtgccaatgcaccacgaacgcctgccagaacaggaacaggcaggtggccgcgccgagcgggcagatgatccagaccatcggcacgcggaacgggcggtgcaggtccggcttggaatagcgcagcaccagcacgccgatgcagaccgtggcaaaggccagcagggtgcccatcgagaccagctcgcccagcacgttcagcggcaccaagccggccagcgcggcggcgatcacgccgaccacgatggtggcgacgtacggggtgcggaatcgggcatggaccttgccgaagaacttcggcagcaggccgtcgcgggagatggtgtaggcgatgcgggtctggcccatcatcatcaccagcaccaccgaggacaggccggcgatggcgccgacttccacgaacgtcttcagccaggacagggtcgggtagggctccagcgcggtcgccaccggcttgtcggtgcccagcaggtggtacggcatcatgccggtcagcaccgcacagacgatgatgtagacgatcgtgcatacggccagcgagccgagcaggccgatcggcatgttgcgttgcgggtccttggtctcgccagcagcggtggagaccgcatcgaagccgatgtacgcgaagaacacgatggtggcggcgcggaagatgccgctccagccgaactcacccggcacgccggtgttttccggaatgaacgggtgccagttggccgggtcgatgtgggccgcgccgatgccgatgaacaggcagatgacagtgaccttgatcgccacgatgatcgcgttgacgaacgccgactgggtcacgcccacgtacagcaggccggacaccgccgccacgatcagcaccgccggcaggttgaacagcttgccggaggagacgaactcgctgccggtccaggcgatgggcgcggcgctgagcatgtccgggaagggcatgtgcagcgtggtggtgatgaagctgatcaggtaggccgaccagcccaccgcgaccgaggccgaggcgaacaggtactccagcaccaggcaccagccgatgaaccaggccatgccttcgccgagggtggcgtatgaataggagtaggcactgccggagaccggcatcatcgccgcgaactcggcatagcacaggcctgccagcgcacaggcgaaaccggccagcacgaacgacagcatgaccgccgggcccgcgtggttggctgcggcctggccggtcagcacgaagatgcctgcgccgatcaccgcacccacgcccagcaggatgaggtgtttagccgtgagggtccgtttcaacgtggcttcgccgtccaggctgccttcgatgggttcgccggcatcgacgtgcccggccggctcgaccggcttgaccctcaacagagctttcagcatgcagtacttcctagtgatcggatggggtgggcggccgatacgttgccggctgccttgaatggtgaaggccgtgcgaacggcccgctgtaccttagccaaagctgaagccaacgcacaagcgcaatcgcaacaatgaacggcgataatgagcagtatttttccgaaccgcccccattcatgagccagaccgccgaaacccttgccgcgcttgacgatcgcctgcgcggcctgctccgggactatgcgcgccgcgaacccgcccacgacgccctggctgccgaattcggcacattgctggatgatccggaagatccgttccgccgcgagcgcctggccggccacttcaccgccagctgctggctggtcagcgccgatggccagcgcctgctgctcacccaccaccgcaagctgcagcgctggctgcagctgggcggccacgccgacggcgaccgtgacctggcccgggtggcgctgaaggaagccgaggaggagtcgggcctgagcggcctggtgctggaagacccggccatcttcgatctggacaagcactggattccggagcgcaaggacgtgccggggcactggcactatgacgtgcgtttcgtgatccgggcgctggggggcgaggccttcgtgctcagcgaggaatcgctcgacctggcctggcggccggtgaccgaggtcgcgtccgatctggaatcggatgaatccatgcagcgcatggcacaccgctggctggcgcgctagccatatgtagagccgagccaatgctcggctcaatgtcggccagaagtgcagccgagcatgggctcggctctacaagtgcaaggcggaacgcgcgtcagtacaggatgcgcgtccgcagcgtgcctggaatcgcggccagttcgtcgcggacggcggcggcctgcgcctcgctggcggtgatgtcaatcaccacgtaacccaccttcgggtcggtgcgcaggaactggccgtcgatgttgacgttgtggcgcgagaagatctcgttgaccctggacagcacgcccggcacgttctggtggatgtgcagcaggcgcaggctgtcttcgtgttcgggcagggtcacttccgggaaattgaccgccgacagggtgctgccgttgtcgctgtagcgcaccagcttggccgccacctccacgccgatgttgtcctgcgcttccagcgtgctgccgcccacgtgcggggtcaggatcacgttgtcgtggcgggtcagcggcgattcgaagatatcgccattgcccttcggttcgaccgggaacacgtccagcgcggcaccaccgacgtggccgctggccagggccgcgtccagtgcatcgatgtcgaccacggtgccgcgcgcggcattgatcaggtgcgcgcccttgcgcatcttcgccagctcggtgctgccgatcatccattgcgtggctggggtctccggcacatgcagggtgacgatgtcagcgcgtgccagcaggtcgtccaggctggccgctgcacgtgcattgcccagtgccagcttggtttccacgtcgtggaagatcacctgcatgcccagcgattcggccagcacgccgacctgggtgccgatgtggccgtaaccgatgatgcccagcgtcttgccgcgcacttcatggctgccgctggccgacttcgaccagccgccgcgatggcattcggcgttcttctgcggaatgccgcgggtcagcatgatcgcctcggcgatcaccagctcggccacgctgcgggtgttggagtagggcgcgttgaacactgggatgccggccagctcggccgcgtccaggtcgacctggttggtgccgatgcagaagcagcccaccgcgatcaggcgcttggcctcggccagcacctcagcgctgagctgggtgcgcgagcggatgccgacgatgtgcgcctcggcgatgcgcgccttcagttcgtcctcgggcagcgccttggtgtgcgcctcgatctggctgtagccggcggcgctgaacacctccacggcggtctggctgaccccctccagcaacagcacgcggatatcctgcttcgggaacgaggtcttcttcggcgacatggggcaacacggccagtgggacaggggctgaccactatgccagatcgaagcgcccatggtgcagtgcgcaattggttgcatccgtagctatctgtgccgctgcggggctggacgctgacgcgtaccgctggcacgcttgcccgtcttcacgcaccgcgttggaccgtcatgaccgattcccgcattgcctcgctgcagcaggcctgtcccggcctgaagctgaagaccgacccggccgacctggagcattacgggcgcgactggacccggcgctggacgccagcgccgctggcgatcgcactgccggccacggtcgaggaagtactggcggtgatgcgctggagtgcgggcgagggcgtggccgtggtgccgtccggcggacgtaccggcctttccggtggcgcggtggccgccaacggcgagctggtgctcagcctggaacggatgaacaaggcactggcctacgacgcggtcgatcgcaccctggtggtgcaggccggcatgccgctggaggccgtgcacaacgccgcgctggaccacggccttatctacccggtggacttcgctgcgcgcgggtcgtgcacgatcggcggcaacatcgccaccaatgccggcggtatccgcgtgatccgctatggcaatacgcgcgagtggatcgccgggctgaaggtggttaccgccagcggcgaactgctggaactcaacaagggcctgatcaagaactccagcggctatgacttccgccagctgctgatcggttcggaaggcacgttgggcgtgatcgtcgaggcgacagtgaaactcaccgatccgccgccggccagcaacgtgatgctgctggcagtacccagcttcgaggtgctgatgcaggtgttcgccgcgttccgcgcgcgcctgcagctgcaggccttcgaattcttcaccgaccgggcgctggagcacgtgctggcgcatggcgcgcaggcaccgttcgacgaggtgcatccgtactacgtcgtcaccgagttcgcggccaacgacgaggcacaggaagccgcggcgatggcggccttcgaggactgcatgggcaacggctgggtcagcgacggtgtgatcagtgccagcgatgcccaggccgcccagctgtggcgcctgcgcgaaggcatcaccgagtcgctggcgcgctacaagccctacaagaatgacgtctcggtgcggatctcggcgatgccggcgttcctggccgagacccaggcactgatcgggcaggcctacccgcactttgacgtggtctggttcggccatatcggcgatggcaacctgcacatcaacgtgctcaagccggacgacaccagcgacgccgacttcgtggcgcagtgcgagcacgtgaccaagctgctggcgcaggtgctggcccgcttcgatggcagcatctcggccgagcacggcatcggactggtcaagaagggctacctggacagcacccgcggccccgccgagatcgcgctcatgaaggcggtcaaacgcgcgttcgatccccaagcgcggctgaatcccggcaagctgttcgacgcctgagccgggcaaatccttcacgtacccgttacgctccacgcaccttcacaaccggcttcgaaccgatgacccgtccgcttctgctgctcgccctgctgtccctgccgctggccggcttcgcttccagcttcgctggcacctcggccggttcggcgaccggtgcctcctccggttcctcgggcagcagctcgggcgacgacaaggtggtgcgggccgcgcgcgacgatgccgctgcgttcgtcgccagcgacggccagatccgtggcgcccgcctgcaggccgcgctggtccacctgcgtgagcagagcgctgccgcacagcaacagagcgacctggaactggcccgcgcgctgctggcgcgttgatgcgggctgcatgacctcggcgtcatcgctttctgcagagccgagccatgcccggctggatgcccggcgcacccggatcgcaacagcagccgagcatggctcggctctacagaagcacagcgggcggtgcgggtggatggccgcattggcatggctgctcagcccttccgcccatgcggctgatcggctgcagctcgatccctccggtctcgatccggcgcagcagcagctcgccagccagaccctggccgacgtgcagtccctgctgccggaaggcctgctgcgcgctttgccggctcaggtgcaggtgcgctggagtgatgaccttcccgctgaggtgcacgggcgcgctttcgccggccgcatcacattgcgccgcaccctgctggatagcggcatgcccggcaaccgccgtgcgcgccgcagtgcgctggtgcatgaactgacccacgtcgccgaccgtggcggtgcgaactggtcgcagagcgtgcgatggcgtgaccttgcgggctggcagcgcaagccctggcacctcggccggggcgacaacgatttccgtgatcgcagcccggatgtctatgaactgacgaacccggccgagtacctggccgtgaatgccgagcatttcgtgctcgacggcgagttcgcctgccggcggcccgcgttggcgcagtggtaccaggcgcatttcggaacaccaccgtcgctgccacggccgcggtgcgccacgacgctgcccctgctgcaggccgaatcggaggagggcgctgcatcgctgctgcagctcgacccggcgcgcgtctacgcggtggactacctgttcgccgaaggcagtgcgcagccgatgagtcgctggggccacagcatgctgcggctggtggtctgcaagccgggccgcgtacctgggccggactgccgcctggacctggagtaccaccgcgtgctgtcgttccgcgcgttcgtgggcgacgtgcagatatccaactggcgtggcctgaccggcggctatccgtcgcggctgttcgtgctgcccctgcagcaggtggtggacgagtacaccaaggtcgagctgcgcgggctgcagtcgctgccgctgcagctgggccgcagcgaaatcgccagcctgctcgagcgcaccgcgcaggtgcactggagctatgacgggcgctattacttcgtcagcaacaactgcgcggtggaaaccgccaagctgctgcaggccggggtgccgcgccttggcgaggcgggcctggcccaactgagtccgcgcggcctgaagcggcgactggtgcggctggatgtgctcgacgagagggtactggcggaccgcactgcagcgcaggcgcagggctactacttcgcctcggcgcgcgaccactaccagcagttgttcgcagtggccgcggcccagctggccttgcccgctcgtgatgtgcgcggctggttgaagctgtctgcacagcaacgcgcaccgtggctgctgcagggtgacctgcgtgccagtgccggcctgttgctgctggaacaggccgcgcagcggcgcgccgagctgcgcgcacgcgatgtgctcaagcggcagctgctggccgcaccggacagcgctgaaacgcgcagcctgcgcgggttgctggagcagagcgggcagtggctgcgcccggggacgctgctgcaggatgacggctatggattgccgctgggcgacgagcaggcgctgctgtccgcggccgtggccactgccagtgcgcaggcggtcccggcgtggcaggcattgcgcggccagctgcgccagcagctgccgatccgccaacgcgaggaaatggatgcgatcgacgccaatctggccgcactcggtgcacacctgcgtacgcaggcagcccgcccggctactggcgcggcagttcgatgacgaagcggctgccgccggcgctgcccgggatgcagtagacgcggccaccgtgcgcgtcggcgatggccttgaccaccgccaggccgagcccgctgccgccgccctgtcgcgaacgcgaaccgtcgccacgcatgaacggggtgaagatatccgcgtgcagttccgggtcgatgcccggaccctcgtcttcgatcgccacctgcacgtggccgggcgtgtcatgcactgcaatccgcaccttgcccgggctggcatagcgccgcgcgttctccagcagcgccagcaatgcctggcgcaggcgggtcgggtcgcagtgcgcgttgtgttcctcgcggctggtttccagctccagcacgaagccggcggcgcggaactgcggatcgaccagggtcatcaccgaatgcacctcggccaccacgtcggtgcgcgcgcgacgcacgtccagccgcgcgttatcggacaggctcagcacgcgcaggtcctcgatcagccgtgacagcccttcgacctgggccagcaggctgcggaactgcgactcgtctggctggaacacaccctctgccagcccctgcaggcggccacgcaggatcgtcaccggcgtgcgcagctcatgggcgatggccgcgtgccacatcgcgcgctcgctctccatgtgctgcaggcggcgcgccatcgcattgaagtcctcgaccagggtcgccacttcgcccggcgaattttcctcaacgctggcgcgtgcacccaggtcgccgcccgcgagcgcacgcacgctgtccaccagcgaattcagcggcgacaggatgcggtgggcgaggcggaacgaggcggcgatggccagcgccagcccggtcaggatcacgcccaccatccatgccagttccgggccggtcggcagccagctttccggctcctcggcactgccggggaagaactcgaccagcaccgcgtacagcagccacgatgacaggatcatcatcacgatgacgccgatcaccatcagcgacatcgaaacgatgatgtggcggctcagcccggagcggcgcagggagggcatcagcgatcggccatcagccggtagccgacaccacgcacgctggctgggacgttgaccatgcccacttcatccagcttgcggcgcagcttgctgacatggctgtcgacggtgcgctccagtgcttcgctttccggcaggcattcgtgcatcagctcgctgcggctgaagatgcgcgtcggcgccagcgccatgcagtgcagcagcttgaactcggtgagggtgagcagcacttcgtggctgtagccttcgccctccacgtgcaccgcgtgggtggccgagtcgatcagcagcgggccgacgcgcaacgcggtgggtgcgtccacgcgcgcggcgcgcagcgtgcgccgcagtacggcgcgcacgcgcgcggccacctcggccgggttgaagggcttgaccacgtagtcatcagcgcccatccgcagcgcggtcagcttgtccaggtcctggtccagtgcggtcagcatgatcaccggcgtctcgccgcgctggcgcagctgggtcagcacgctccagccgtccaggcgcggcagctgcacatcgagcaggaccaggtcgggccgggcgctgcggtgcaggtccagtgcgctgtggccatcggcggcgcgcagcgtgcgcagtccttcgcgttccaggtaggcgcagagaatgtcagcgatctcggcctcatcctcgacgatcaggacgagggcggcgagggcaggggaggcatgcatgcaggggcggggccgtaaggtgcttgcctccatcgtatctccacagttcctccatcgaaaccccatcatcgccacgcagactgcgcgcttcagaacctatccgccgcctgcgcggcattgtgcacagcaatgagaaccttcaggactccggtcgcgttgatcgcggccctcgccttggccatgacggcctgctccactcccgaagccacccccgaggcggcgccgcgcgtcagcgtgatcagcgtcggcccgcaggtggtgcaacgtgacgacgaactgccaggccgcgtcgcggcggtgcgcaccgcgcagatccgcgcacaggtgggcggcatcgtgcagcggcgcctgttcgaccagggggcggaagtcagggcaggccaggccttgttccagattgacccggcagcgttccgggccgacgtcgattcggcgctggccgcactgcagcgcagtgaggcggcgttgggccgcagtcgcgtgcagtcgcagcgcctgcacgccctggctgccgcgcaggcggtcagccagcagcatcgggacgacgccagcgccgagtacgagcaggcacgcgcggcagtgaatgaagcgcgcgcgatcctgtcccgtcgccagctcgacctgcgctatgccacggtcagcgcaccgattgccggtcgtatcgatcaggcattggtgaccgaaggtgcgctggtcggcgtggccgatgccgagccgatggccgtggtacagcagatcgaccaggtctacgtggatgtgcgccagccggcggcgcagctggagtcgctgcagcgcagtgcggccggcggcgacaagctgccggtgaccatcatcggtgccgccggcaagccgctgcccgagcgtggccagctgctgttctccggtatcaatgtcgatgcacggacgggtgatgtgatcctgcgcatcctggtggacaacccgcggcggcagctgctgcccggcatgtatgtgcgcgcgagggtgccgcggggtgccccggccagcgcgttgaccgtgccacagcaggcggtgctgcgcagcgccggtggccaggcctatgcctgggtgatcggcgccgagggcagggcggtgatccgcacgctggaggtggacggcagcgtcgatcgccagtggctggtgcgcgcgggcctgaaggccggcgagaaagtggtggtcgagggccaggagcgcctgcaggaaggcgtggtggtcgatgcgcgcgactggcagaagccggtcgccagcgccggtgcggtgcaggccggcagcaagggctgagcctttcccgggacagcccctccaggaaaatccaacatggcacgtttcttcatcgatcgcccggtgttcgcctgggtgctggcgatcttcatcatcctggccggcgcgctggcgattccgcgcctggccgtggagcgctatccggcggtcgcgccgcccagcgtcagcatctatgccagctacccgggtgcgagcccgcagacgttgaacgatgcggtggtcggcctgatcgagcgcgagctgtccagcgtcaagcatctgctttacttcgaatcgtcggtggacacctccggcgaagcctcgatcaccgccaccttcaagtccggcaccaatccggaactggcgcaggtggacgtgcagaaccggatcaaggcgatcgagccgcgcctgccgcgcagcgtgcggcagaacggcctgttcgtggaggccgccgattccggcttcctgatgctggtcggcctgcgttcgccggatgccagcgtcagcgaggccgcgctgggcgatttcatggcgcgcaacatcatcgaagagctgcgccgcatcgatggcgtcggtcgcgtgcagttgttcggtgccgagcaggcgatgcgcgtgtggctggatccgacccggttgaccggctacggcctgaccatgggcgatgtggccactgccatcgagcagcagaacctggagatctcgccggggcgcatcggtgattcgccgggtgttccgggccagcgcatcaccgtgccgctcagcgccgacggccagttgtccacgccggaacagttcgcggcgatcgtactgcgcgccggggccgacggttcacgggtggtgctgggtgatgtcgcccgcgtcgaactgggcgcgcagagctatgcctggggcacccgcgaggacggccatccggccaccgccgccggggtgcagctgcggccgggcgcgaatgcggtgcgcacggcgtcggcggtccgtgagcgcatggccgagctggcgccgctgttgccgcgcggcgtggaggcgagcatcccgttcgacaccgcgccgttcgtcaagatctcgatccagaaggtggtgcagacgctgctggaggcgatgctgctggtgttcgcggtgatgtacctgttcctgcagaactggcgctacacgctgattccggcgctggttgcaccgatcgcgctgctcggtaccttcgcggtgatgctggcactgggcttctcgatcaacgtgctgaccatgttcggcatggtgctggcgatcggcatcatcgtcgacgacgcgatcgtggtggtcgagggcgtggagcggatcatggccgaggagggcctgccgccgcgcgaggcgaccatcaaggcgatgcgcgagctgaccggcgcggtgatcggcatcaccctggtgctgaccgcggtgttcattccgatggccttggccagcggctcggtgggcgcgatctaccgccagttcaccgtggcgatggcggtgtcgatcctgttctcggcgctgctggcactgagcctgacaccggcgctgtgcgcgaccctgctgcgcccgaacacccacggccatcatggtcgtgacgggctgttcggcgccttcaatcgtggcttcgaggcgttgaccgggcgctaccagcgtggcgtggcctccgtgctgcagcgaagcggccgggtgatgggcgtgttcgccgcgctggtggcggcgctgctgctgggcctgcactggctgccgggcgcgttcctgccggaagaggaccagggctatttcatgacctcgatccagctgccggccgaagccaccgccgaacgcacgctggcggtggtcgaagcctacgaacggcacgtggcctcgcgcccgggcatcggctccaaccagtcgatcctcggttacagcttctccggttccggcccgagcgcggcgctgacctacaccatgctgaaggactggggtgagcgtgctggcgccaccgcggccggcgaggtggaggccgcgcagcaggcgatggccacggttgccgagggcgaggtgatgagcgtgatgccgccggcgatcgacagcctgggccgttcgtccgggttctcgctggccctgcaggcgcgtaccgggcagagccaggccgagctgcgcgcggccctgcagcagctgctgaagctggccgaggccagtccgctgctgtcggaggtgcatgccgatggcctgccggcaggtaccagcgtgcggctggacattgatcgcgccaaggccgaggcgacgggcgtgggcttcgagcacatcagcagcacgttgtcagcggcgatgggctcgcagtacgtcaatgatttccccaacaagggccggttgcagcaggtgatcctgcaggccgacgcgccgcatcgcatggaactggaggacgtgctgaaactgtacgtgcgcaacagcgagggcggcatggtggcgttgtcggaactggtgaccccgaactggaccgaggcgccgctgcagctgcagcgctacctcggcttcccggcgttgaatctgtccggcgcaccggcccccggcgtgtcgaccggccaggccatggcggagatggagcggttggccgggaagctgccgtccggttttgccctgcagtggaccagccagtcgctgcaggagcgtgaatcgggggcgcaggcgccgtggctgctgttgttgtcgatgctggtggtgttcctggtgctggcggcgctgtacgagagctggtcgattccgctggcggtgatgctggtggtgccactcggcctgctcggtgcggtcgccgcggtgctgttgcgtggcatgcccaacgatgtgttcttcaaggtcggcatgatcaccgtgatcgggctgtcggcgaagaacgcgatcctcattgtcgagttcgcgcggcagctgcagcagcaggggcgcggcctggtcgaggcggcattggaggcagccaggctgcgcctgcgcccgatcgtgatgacctcgctggcattcgcgctgggcgtggtgccgctgatgctggcgcagggcgcgtcgaaggaaacccagcaggcgattggaaccggtgtgttcggcggcatggtcagtgcgaccgtgctggcggtgttcttcgtgccggtcttctatgtagtggtgcagggcgcgcggcagtggatcgcgcagcgcctgcgcaggcgccggccgatgccgggaggaaccgtggatggaacggaacatcgttgaagatctgcatgagcaacagttgatggcgctggagcagcgcctgtgcgctgcgctgctggaaaatgaccacgatgcgttgaacgcgctggtatcgccggccttgttcatgatggaaggccacggcggccgcatgctcgatctgccatggctgggcgattggctggccggcagcgtgcaggtgcgaagcctgcagctgcacgcggtggagacgctgctgtgtggccgcctggcgttgctgtccagcgacgtgcggttgtccgtgtggcggcagggccgggagcgtgaagtgaagctgcgcctgctgcgggtctgggcctgcagttccggcggcagcggtgcgcagctgttgtcgatggcggtactggccgcgtgagtacggtcaggccgctttcaggccgcgctcaccggcaggtggtagggtcgaaggtctctgtagtgtcgacaaggagtcgagccatgcgtgtagttcccagtctgttggcagcctcgctcgggttggtgctggccgcgtgccagccggcccaggcacccgcggcgggcagcaatgacgccccgcctgccacgccgcagccgagcgccaacacggaaggtggcagcgagaccgcctaccagtgtggtgatctgagtgtgggcgcgacattcaatggcgaggatgctgccacgctggtgatcggcgagcgtagcttcgccatgacctccgagcgcgcggcatccggcgccaagtacagcgatggccttggcaacagcttctggaccaggggcagcaatgatggcctgctgagcctgaagggcgaaccggatcgcgagtgccatgcggtggaagctaccgaaggcgatggcagcgccggcaatgccgcgttccgtgccaccggcaatgaacctggatggcttgcagtcgtcgatggcgatatgccgggcctgcaggtggaagttgactatggcgagcgccgcttcgacgtggccaaacccacccagggcgctgatggatggagcgggaaggcgtccgacggcaccgacgtcaagctcagcttccagcgcaccacctgccaggatgacatgagcggcgagacattcgaggccaaggcgatgctgactgtcggtacccgccagtaccatggctgcggcaacttcggtgcgaaacagccgtaagttacctgtagagccgagcccacgcgcggctgcagtagctgtccagcccacagcagccgagcgtgggctcggctctacacaaccgctgccaccgatgatccgtccgctgcctgcggcgaacacgccgcaggcagggagcggcaggcgatcggcgcagggtgctcagtcggcgcggccagcgaattcgccggtggcggtgttcaccagcacgcgttcgccgttgacgatgtattccggcaccatgatctcgatgccggtgttgagcttggccggcttcgggcgcttggtggcagtgccgcccttcagttccggcggggtctcgatcacttccagcaccaccgaggccggcagctggatcgccaccggctgctcgtcgatcacctgcacgtagatgccggtcaggccgtcggtgatgtagccagcgtcatcgccgatcacgtccgcgtccagggtgtagggggtgtagtcctcgtcatcgaggaacacgaaggcatcgccgtccttgtacgaataggtggactggcggcgcagcagttcgacctcgaccaggttgtcgtcggcatcgaagctggcgtcgagcttgttgccgcccggcacgctgtacatgatgaagcggaagcggacgttgccgccgcgaccctgcggcgagctgcgctcgatgtcgcggatctggtacacgccgttgttgtactcgacgacgttgcccttcttgatgtcgttggctttcatggtgatctaggtcgttgggggagggcgccgtcccggcgcccggggggaatcacttcggagcgaggcgggtagcgccgtccaggcggatggtctcgccgttgaggtaggtgttgccgaggatgaagccgaccaggctggcgaagtcttccggcttgcccaggcgcgacgggaacgggatcgaggcggccagcgactgctgcacggcttcgggcatgccatcgaccatcggcgtccagaacacgccaggagcaatcgtattgacgcggatgccgaagcgcgacagttcgcgcgccatcggcagcgtcatcgacaccacgccgcccttgctggcggcatacgcggcctggccgatctgtccttcataggcagcgatgctggcggtgttgatgatcacgccgcgctcgccgtcttcgccggcgtcgttgtgctgcatgcggttggccgcggccttggcgacgttgaagctgccgaccaggttgaccatcaccgtgccctggaagccggccagcggcatcgggccttccttgccgagcacgcgaccggcgccgaggatgccggcgcagttcatcgccacgttcaggccgccgaggaaatcgtgggcctggtcgatggctgcagccacggccgcctcatcgctgacattgacattgaaatagcgggccttgtcggcacccagcccggcaacggcagctgcacccttgtcgtcgttgaggtcgaacagagccaccttgccgccctgggcgacgaggtgctgggccacggccaggccgaggccggagacgccgccagtgatcacggcacgtacggaagacagctgcattgcacggtcctgcaggttcgagaaccgccgattctaacggaagcggcgaccgtcgccgttgtgcgctgcgccgcccgagcgggagcggcgcagcggggtgctcagccggccgctgcgagcgcctggccggtgcggctggcggtggcgcggccgagcaggccggccagccagcggccggtctcggccagtgccggcaggtccacgccgctgtccaggcccaggccctgcagcaggtagaccacgtcctcgctggcgacgttgccgctggcccccttcgcgtacgggcagccaccggcgcccgagactgcactgtcgaccacgcgcacgcctgcttccaggcaggtggcgatgttggcgatggcctggccgtaggtgtcgtggaagtgcacggccaaggcttccatcgggatctcggcagcgaccgcctgcagcatcgcccgtgccttgcgtggggtgccgacgccgatggtgtcgcccagcgagatttcgtaacagcccatctggtgcagcgcgcgcgccacccgcaccacgtcggccagtggcacctcgccctggtaggggcagccgagcacggtggagacgtagccgcgcacgcgcacgccatcggcggcggcgcggtgcaggatcggctcgaaccgggccagcgattcgtcgatgccggcattggtgttggtgcggttgaaggcctcggatgcagcggtgaacaccgccacttcctccacgcccaccgcgcgggcgcggtcgtagccctgttcgttcggcaccagtaccgggtagtggatgcccggccggcgctggatgccggcgtagacctcggcggcatcggccagctgcggaatccacttcgggctgacgaaacttgtcgcctcgatgctgcgcaggccggtggccgacaagcggttgatcagttcgatcttgtcggcggtggacaccgactgcttttcgttctgaaggccgtcacgcgggccgacctcgacgatgcggacgtagtcgctcatgcagccacctcgccgatggggcgatggcagaccgcttcgatgttgttgccgtccgggtcgagcacgaaggcggcgtagtaatccgggtggtaccacgggcgcaggcccggcgcgccgttgtcgcggccaccggcggcgagggcggcggcgtggaaggcgtccacctgcgcgcggctggcgcaggcgaaggccacgtgcacgccgtggctggcggtgccgccattgccgagccagaagaacggcttgccgtcgctgccgaagccgatgtggtcgtggtcgccggtctgttcggcgctcacttccatcaccacgccgatctgcagcggcgccagcgcctgcaggaagaaggtcttgctgcgcgccaggtcggcgctggtcaaaccaagatgatcgagcatgttcaggcttccgtgacccaatggggggcgcgcttgtcgaggaaggcgcccaggccttcctggccctcggcggacacccgcaggcgcgcgatcagggcggcattatcccgatccagcgcatcgcggtcatggctgtcgcggacctgccggaccagctgctttgcggtggacgaggcgatcgggccggccttgtcgagcagggccagctggcgctccagcgcttcgtccaggcgctcgggctcgaccagctggtggaccaggccgatgcgcagtgcggtatcggcgtcgaagtgctcgccggtggcgaaccagcgccgcgcctggcgcgggccgatggcctcgatcacgtaaggcgagatcaccgccggcagcaggccaaggcggctttcggtcaggccgaagcgggccgaggtgctggcgatggcaatgtcgcagcaggcaaccaggccgacgccgccaccgaaggccgcgccgtggacccgggccagggtcggcttgggcagctcgtccagggtgcgcatcagccgtgccagtgccagcgagtcctcgcggttgtcggcctcgctggccgccgccatgccgcgcatccactgcatgtcggcaccggccgagaaggaggcgccgtggccggcgaccaccacggcccggaccgaatcatcgcggccggcggcttccagcgcggcggtcagccgggcgatcaggctggcgtcaaaggcgttgtgcagctccggccggttcagccagagggtgaggacggcgccacggcgctcgatctgcaaagcatcgttcatgggattccagggtcactccatacctgtatggatcatagcgggccattggtcatgggccatgacgcgacgcgggaatgttagaatcgagaaccatttacatccagcagagaacacgctagatgacgctgtccgaactgccgctgcacacctcggccgtggtcgagtccgtgcaggacctgcatgccaacgatgccattgcccggcgcctgcgcgagctgggtttcgtgaacggcgaggaagtgcgcctggtggccaagggcccggtgggcggcgagccgctgctggtgcaggtcgggttcacccggttcgcgctgcggatcagtgaagccaagcgggtcgtggtcgacgccgccagccaggaacgacgtgcatgaccgcaatcgccgccaccgcccccctgcgcatcgcgctggtcggtaaccccaacagcggcaagaccgcgctgttcaaccagctgaccggcagccggcagaaggtcgccaactacaccggcgtcaccgtcgagcgcaaggagggccgcctgcgcgcgccgtccggccgtgaattcgccgtgcttgacctgccgggcgcctacagcctgcatccggccagcctggacgaggcgatcacccgtgacctgtgccggggcttctacccgggcgaggccgcgccggacgtgctgctgtgcgtgatcgacgccaccaacctgcgcctgcacctgcgcttcgcgctggaactgcgcgagctgggcaagccgatggtggtggccctgaacatggtcgacgcggcccagcgccgcggcatccaggtggatgtggccgcgctggaacgcgagctgggcgtgccggtggtggagaccgtggcggtgcgcaagcagggcgccaaggccctggtcgagcgcctggacgccatggtgccgcacctggatgcgccggtgccgggcccggaaggtggcatcgattaccacgccaaggtgcgcgggatcctgtcggtcgccgtgcggatgccggcacggaccgcgaagatcgacgacgcgctggaccgctggctgctgcacccggtgttcggcctggtcagcctggcggtggtgatgttcctgatcttccaggcggtgtacgcctgggcgacgccgctgatggacggcatcgaggctggcttcgcctggctcggcacctttgttggcagcgtgctgccggaaggcccgctggccagcctgctgaccgacggcatcatcgcaggcgtcggcggcgtggtggtgttcctgccgcagatcctgatcctgttcttcttcatcctggtgctggaggagtccggctacctgccgcgtgcggcgttcctgctcgaccgcatgatggcggccgccggcctgtccggccgctcgttcatcccgctgctgtccagcttcgcctgcgcggtgccgggcatcatgtccacgcgcagcatccaggacccgcgtgaccgcctggccacgatcctggtggcgccgctgatgacctgctcggcgcgcctgccggtgtacgcgctgctgatcggtgcgttcattccgcagaagacggtgtggggcgtgttcaaccagcagggcctggtgctgttcggcctgtatgcggcgggcattctcagcgcgctggcgatgtcgtggatcatgaagaagtggcgtcgcgacaagagcgagcacccgctgatgctggagctgccgtcgtaccgcctgccgcatgtgcgcgacctggcggtggggctgtacgagcgcggcacgatcttcctcaagcgcgtcggcggcatcatcctggcgctgaccatcctgctgtgggtgctgctgtcgttcccggcggcaccggccgacgccacgatgccagccatcgactacagctacgccggccagatcggccatgcgatggcggtgttcttcgcgccgctgggcttcaactggcagatctgcatcgcgctgatcccgggcctggccgcgcgcgaggtggcggtgtcttcgctggccaccgtgtatgcgctgtcggccgccgatgacgatgccgccagccaggcgctgaccccgctgatcagcgatggctggtcgctggcgaccgcgctgtcgctgctggtctggtacatctacgccccgatgtgcatctcgacgctggccaccatcaagcgcgagaccaattcgtggaagcagatgggctttgccgcgttctacctgttcgcagcggcttatgtggccgcactgatcacctaccaggtgaccagggcgctgggaggcggctgatggataccggcctgctgatccagtacctgatcatcgcggtggctgtgctggtcagtgcctgggtggtgctgaagaagcagttcccgggcaccgtgcgcacgctgcgcggtgcgttggcgttggccctgttgaagccgggccgcgccgcctggctgcaggcgctggggcggaaaatcgcgccgccggcaacgggcggcggtggtggtgcctgtggcggttgcgacagctgcgggccgaccaagaagtagcgtcgagccatgctcgacggcggccggccggtgggtgcgaaccttcggccggtggtgcgggccttcgccctgtgggtgcaaaccttcgccctgtgggtgcgaaccttggttcgcacgctctcgggattcagacctctctgcggatgatcgcccggaagttcccgtcccggttgaatcgccgcaccgattccctgttcccatgggctgccgcgaaacctgccacgtcggccagggcatcgagcagcagggccttcaacgcgtcgcggttaccggcctccagcagatcttcaagatcctgctggatgaaggtccggcgcaggcccggcgtttcttcgatccgccagtcgacatggggcgtggggatgctggagcggtaccggaaagccgtttcaagatcgtcaggcgcgaggggatacgcgagcagctccggaaagtagagtccagcattcacatagaagccccggctttcgctggcgcgctggtgattcacgacaagcagcgcggcgtccagcaagcggtagcgggtcgtcgacgtcccggcaaagccggtcttcctggcgcacttgctgaagacagtcgaggatttcatgggctttgcctgggccgtaacaagggcccacagccttgaggcgcagtgcctgacggtcaattggcaaacgcgacacccgcaacgagtgccgcaggtgggtgcgaacgctccaggtgggtgcgaaccttggttcgcacgctcttccagctagttggcccgtgagcccagctccgctgccaacgccagccaccggttgcgttgctccggcgagctgctgcgcaccgcaccgagtcggctgacccgcaccgggcggatgccgcagaattccagaatagtggcgcggatctgggcgatgcccgggtcgcggtagatccagcggtaataccagggcggcgtatccagcgtggtgatcacccgtgcgctgcgaccggccagcagccggtcccaccagactgaatcgcgccggtagcggaaggcgtaccccggcagcagcacgcgatcgaagaagcccttcagcagcgccggcatcgcgccccaccaggtgggatagaccagcaccagatggtcgcaggcctcgatcgcatccgcagtgtcctgcaggtcggcttccagcggctggatctggcggtagccatggcgcagcaccggatcgaactcgagttcgcccagtgcgatcaggcgcacccgatggccagcattctcggcggcggtggcgtagcgctgggcgagggcaccgcacaggctgtcgcggtcgggatggccgagcaggatcaggatggaacgggacacggcaacctcgggcaatggaaagtgcgcgaggttgggctatgcccttggggcagagtcaaccaccagcggcgcagccgctgggttccaggatgcagtcaccgctgccggagtgcagccactgccgcagttcgtcgctgacctgctgcaggtcgagctcgacctgcgccagccgtgcccgctcgctggcgatgcggctgcgttgttgctcgagcagggccagcaccgcgggccagtcgagccgtccgtcgcggccctgcaggcgggagatcgcggccagggtgatgcccagcgccaacgcctggcggatcagctgcacccaggccacatcctgttcgctgtagtcgcgatagcggttcagccgcggcaccggcggcagtagtccgcgcgcctcgtacaggcggatggccttggcgctggcgccggtcaggcggctgacctcggaaatgcgcattggctcagtcccgcaccagcccgccatcgaccaccaggttctgcccggtcaccgcgcgcgaccaggggctggcgaagaacagcgcggcatcggcgaattctgctggcgtggtaacgctgcgcagtggcgtgttggcggcgatgtagtcgaacactgcctccggcgtggcagcgctggcatcggtggtgcgcagcaggccgccggacagcatgttcacggtgatgccatgcgggccgaggtcgccggccagcgtgcgcgtgagggacagtagcgcggccttggcggcggtgtagtcgtggtagggcacgaccgggttctggaacaggttggtgccgatgttgatgatgcggccgaagcggcgggcctgcatgccgggcagggcggcctgcacggtgttcagcgcgccgcgcacgctgccctcgaactgcgcctggaacgccgaccagccgatatcggcggcgccgtcgcgggcatcaccattgaacgagaacgcggcgagcgcgttgttgaccacggtggtgacgccctggccgaagtgggccagggcgtgctgcagcattgcatcgacctggctgcggtcggtgacgtcggccggcagcgcgatcgcctgtccgcccagctcggcggccagcgcccgtgcggggccttcgctgcggtggtagttgacgatgacgcgcgcaccctgcaacgcgaacgcgcgggcgatgtgctggccaaggccgcggccggcgccggtgaccagcaccagctgttcgctgatctgcatgaaggggctgccatccattgcatgaaagggcatgcagcgtagcagtgatggcgcttgccggagcaggcgtgctgccgctagcctgcaggcatgaaccagactcccctgcgattgctcattcacggcgcctccgggcgcatgggccaggccctgctgcggctggccgccgaacatcccgaaaccctgcagatcgtggccgcagtgaccggccgtgcgccggcacagcgcgtggtcgacggcgtgccgttcttcggcgccagtgagctgcccggcgcgccggtgttcgatgtggcgatcgacttcagcctgccggagggcttcgacccgatgctggcgctgtgcgtggagcggggtgccgggctggtgtcgggcaccaccggtatctccagcacgcagcgccaggcgctggaggccgcggcggcgaagatcccgctggtatgggcctcgaacttcagcctgggcgtggcggtactggacgaactggtggagcgcgcggcgcaggcgctggccggctgggactgcgacatcgtcgaatcgcaccacacccagaagaaggacgcgccatcgggcaccgcgctgaccctgggcgcagccgcgcaacggggcggggcggagccgcactacgccagcctgcgtgccggtgacatcgtgggcgagcacctggtgcagttcaccggtctgggcgagcgcatcgagctggtgcatcgggccaccaaccgcgacattttcgcccgcggcgccctgttcgccgcccgccagctgcaggggcgggcgccgggcagctaccgggtgcgggacctgctgcagtagggcgggctgattcgtggggtcggatccctttcctgcggaaagggctctgaccccatccgagggcgcctggggtcagagcctttcccattcgggaaaggatccgaccccgcctccggcctgcatacaccgccggattgaaatgaatgcgcaatcgcctgttcatgaagcgcgataaccgctggcgcgagcgccccggcagcgctacaattcgcactcgccgaatcacgaaagccggaccggtcccagaccgtacgtccgcgcttttttgcaaccggatttccgtgaagcgcaggcgtgacttcggcagccccctcggtagccaaagtgagattcccgtgacccaagccgcaatcctcgtcctcgaagacggcaccgtattcgagggcgaatccgtaggcgcgcccggcctgtccgtcggtgaggtggtgttcaacaccgccatgaccggctatcaggaagtgctgaccgacccgtcctacgcccggcagatggtcacgctgacctatccgcatatcggtaacaccggcatgaccgaccaggacaacgaagcgtccaaggtgtggtcggccggcctgatcgtgcgcgacgttccgcgccgccccagcaactggcgcagccaggtgtcgctgcaggactggctgatccagcgtggcgtggtcgccatcgccggcatcgacacccgcaagctgacccgcatcctgcgcgagaagggcgcgcagaacggtgcgctgatggccggcgacatcgacgtggaaaaggcactggaagccgcccgcaagttcccggggctgaagggcatggatctggccaaggtcgtcactaccgagaagacctacacctggaccgagggccagctggacctggatgccaatgccttcgtcagcgtgccggcccggttcaaggtcgtggcctacgacttcggcgtgaagaccaacatcctgcgcatgctggccgagcgtggctgcgaagtgaccgtggtaccggcgcagaccccagccgccgaagtgctggccctgaagccggacggcgtgttcctgtccaacggcccgggtgacccggagccgtgtgactacgccatcgaagcgatcaagaccttcatcgatgtgaagatcccgaccttcggcatctgcctgggccaccagctgctgggcctggcctcgggcgcgcagaccatgaagatgggccatggccaccacggtgccaatcacccggtgcaggacctggacagcggccgggtgatgatcacctcgcagaaccacggcttcgcgatcgatgaagcgaccctgccgccgaccctgcgcgtgacccaccgctcgctgttcgacggcaccaaccagggtgtcgcccgcaccgacgtgccggcgttctcgttccagggccacccggaagcgtcgccgggcccgaccgatgtcggtccgctgttcgaccgcttcgtggtgctgatggagcaggccaaggcgtgatcagtacgccgccggcccccggtggcgtcgcgatggaccgtaaaccccgcatcgctgctgcccccggcgcggcgctgcggatcaagattcctgatcgacagcgtgcgatcactcccccttgtcacgctgtactgacttagagaagaaaatgcccaagcgcactgacctcaagaccatcctcatcatcggtgctggcccgatcgtcatcggccaggcctgcgagttcgactactccggcgcccaggcctgcaaggccctgcgtgacgagggttaccgcgtggtgctggtcaacagcaacccggcaacgatcatgaccgacccggagatggccgacgccgtctacatcgagccgatcaactggcagacggtcgagaagatcatcgccaaggaaaagcccgatgcgctgctgccgaccatgggtggccagaccgcgctgaactgcgcgctggacctggccgacaacggcgtgctggagaagtacaacgtcgaactgatcggcgccaagcgcgaagcgatccgtatggccgaagaccgcgagctgttccgcgtggccatgggtgagatcggcctggaatgcccgaccgccgccgtcgcccacaccctggacgaagcgctggagatccagacccgcgtcggctacccgaccatcatccgccccagcttcactctgggcggcagcggtggcggcatcgcctacaaccgcgaagagctggtcgagatcgtcagccgcggcctggaactgtcgccgaccaccgaggtgctggtggaggagtcggtgctgggctggaaggaattcgagatggaagtggtccgcgataccgcggacaactgcatcatcgtctgctcgatcgaaaacctggacccgatgggcgtgcacaccggtgactcgatcaccgtggcgccggcgcagaccctgaccgacaaggaataccagcgcctgcgcgatgcctccatcgccgtgctgcgcaagatcggcgtcgataccggtggctcgaacgtgcagttcggcatcaacccgaagaccggccgcgtggtcgtcatcgagatgaacccgcgcgtgtcgcgttcctcggcgctggcctccaaggccaccggcttcccgatcgccaaggtcgccgccaagctggccgtgggttacaccctggacgaactgaagaacgaaatcaccggtggcctgaccccggcctcgttcgaaccgtcgatcgactatgtcgtcaccaagatcccgcgtttcgccttcgagaagttcccggccgccgacgcccgcctgaccacccagatgaagtcggtgggcgaggtgatggcgatgggccgtaccttccaggagtcggtgcagaaggccctgcgtggcctggaaaccggcaaggtcggcttcgacccgaccggcctggacctggccaacgaagacgacctgcagaccctgcgtcgcgagttgaaggcgccgggcccggagcgcctgttcttcgtcgccgacgcgttccgcgccggcatgagcgtggaagagatctacgcactgtcgttcatcgaccactggttcctggaccagatcgaggaaatcatcgctgcagaaggcgaagtcgctgccggtggcatcgacgcgctggacgccgcacgcctgcgcaagctgaagcgtgctggcttctccgatgcgcgcctggcgcagctgaccggcaccaatgaagccgccatccgcgcgctgcgtcgtgcgcacaaggtgcgcccggtctacaagcgcgtggactcctgcgccggtgaattctccaccggcaccgcctacctgtactcgacctacgaggacgagtgcgaggccgcgccgagcaaccgcgacaagatcatgatcctgggcggtggcccgaaccgcatcggccagggcatcgagttcgactactgctgcgtgcacgcggcactggcgctgcgcgaggatggctatgaaaccatcatggtcaactgcaacccggaaaccgtgtcgaccgactacgacacctccgaccgcctgtacttcgaaccgctgaccctggaagacgtgctggagatcgtcgaactggaacagccgaagggcgtgatcgtgcagtacggcggccagaccccgctgaagctggcgcgcgcgctggaagccaatggcgtgccggtgatcggcaccagcccggactcgatcgacctggccgaagaccgcgagcgcttccagcagctggtcgacacgctgggcctgaagcagccgccgaaccgcatcgcccgcaacgaccaggaagccctgctgctggcccgcgagatcggctacccgctggtggtgcgcccgagctacgtgctgggcggccgtgcgatggaaatcgtctacggcgaagccgacctggcccgctacgtgcgcgacgcggtgaaggtgtccaacgattcgccggtgctgctggaccgcttcctcgacaacgccgtggagtgcgacgtcgacatcattgccgatgcccagggcaacgtcctgatcggtggcgtgatggagcacatcgaagaagccggcgtgcactcgggcgattcctcgtgctcgctgccgccgtactcgctgtcggctgaaacccaggccgagctgcgccgccaggtggtggagctggccaaggccctgaacgtggtcggcctgatgaacacccagttcgcgatccagaccagcgacgagggtgccgacaccatctacctgctggaagtgaacccgcgtgcctcgcgcaccgtgccgttcgtgtccaaggccaccggcatgccgctggccaagatcgccgcccgctgcatggccggcaagacgctggccgagcagggcgcgaccaaggaaatcgtgccggactactactcggtgaaggaagcgatcttcccgttcgccaagttccagggcgtcgacccgatcctcgggccggagatgcgctccaccggtgaggtgatgggcgtgggccgcaccttcaacgccgccttcgcgcgggcgcaggaagccggcggcatcaaggccccgccggttggcaaggccttcgtctcggtgcgtgatccggacaagaagcgcgtgctgccggtggccaaggcgctgctggcgcgtggctacagcctggtcgccacccgtggcaccgccgcctggctgcagcagcacggcatggactgcgagatcatcaacaaggtggtcgaaggccgtccgcacatcgtcgactcgatcaagaacggcgagatcgtctacatcgtcaacacgaccgaaggtcgttcggcgatcaacgactcgttctcgatccgtcgcgaggcgctgcagcatcgcgtcacctactcgaccaccattgccggcgccaaggcgctggtggattcactggaattccgcggcaccggtcccgtctggtcgctgcaggagctgcacaaggagttgaatgcgtgagagcccccatcaccatgaagggcgcgcagaagctgcgcgacgaactggatcacctgaagtcggtcaagcgcccgaaggtgatcgccgccatcgccgaagcgcgtgagcatggcgacctgaaggagaacgccgagtaccacgccgcgcgcgaggaacagggcttcatcgaaggccgcatcaagcagctggaaggcgagctgtcgcacgccgagatcatcgacgtgagcaagctcaacgccggctccaaggtggtgttcggcgccagcgtgacgctggccgacgtggaaaccgacgaagagaagaagtaccagatcgtcggtgacctggaagcggacatcaagctgggcctgatcgcgatttcctcgccggtggcgcgcgcgatgatcggcaagctggaaggcgattcgatcgtgatcgacgccccggccggccagcgcgagtacgagatcgtcagcgtcagctacgtggactgacacggtggcaacggcgaccctgctgttgccggcccgcagccgctttgccgcggctgcgttgccggacgatgtggcacgtgcgctcggccgtgccacgaccgtgcaggtcgcgccgggcgaacgcgcgcagctgacgcgccattttgcggttgccgcgccgcactggccggtggccgcgttgacccgccagcgcgacgtcggcgatgccgccggcgccagctggctgcgtgccgatccggcctgcatggtgccggacatgcatggcgcgcggatgatggcctacggcgaaacgctgcggccgacgctggccgacagcctggccctgctgccggtgctgcagcccttgtttgccgatgccgggttcgtgcttgacgcaccggacccgtcgcgctggtacctgcggcttccaatcgacctggtgctgccggacttcaatagtccggacgaggtgctgggcgatgacctgttctcgcatctgccggagggcgagggcggccgtcgctggcgggcgctgatgaccgaagcgcaggtactgctgcacaaccattcctggaaccagcagcgcgccgctcagggacaacagccgatcaattcgctgtggttctggggcggtggcgtgatgccggtgtcggtcagcacgccgcacgcacaggtgcgcagccgcgatgccctgctgcagggcctggccctggcggctggcgtagccgtggatggcgaacaggcggtggatgcactggtcgacctgcgccagctgcgttcgctgcagcagctcggcaatgatgcaatccggccgctgctggccgcgctcaagcgtggcgagctgcagcggctggtgctggatttcgaggacggcctgcagttccagctggaccgcggccagcgctggcagttctggaagaagccgcggcagcttcacgattgatcggggcctctgccgtgcggggtcggatccgttttcctagggaaaacggctctgaccccattttgtctatcgatatctgaaagatgtgtcgaccaaggtcgacacctaccagcagcggcgtgaacctgtcgaaggtggggcggtgtcggattgcggggtgtcagccgcatggatgcggctgccaagcctacagggacgtacttgcggcgtccccgcaatccgacaccgccccgccaacccacggactccccgctgttgctgttgcttcggatgttgcttcggcaggtgcagggcgcagccctacaaacaatcacctcaccgtgctgaccacggtcggcagctgccaatgccctcccgccacgccgcggcactgcccggtggtgaactcgccgctcttcacgaatcgcgcgccatcccaggcccagtcgtggccggagaagcagtcaccgatgccgcgtccacggaagcgcccgcgcagcgtcgcatcatcgcgatcaaagtcctccgcgttggaggtcacgaacttcgcctggtacggcgccttgtcctgtactacccagtagccgctgctgaagttgtaggcacccatgaagcaactggtgcttgccagtacatgctgggcgtccagtcgctggatctcgatctcatctgtcccgccatcgctcaggcggccgcactcatccggcttcggcaggctggcgatcagcgccttgcgcaggcccggtgccttggccagcgccgcgtccgaggcgcgcggtgccatcagcgtgccgcgcacgatcactggcaccggcaacgccgcaggcacgctcgcttcgggcttgtcgccacgccgcaccagcgcaccgggcgtgcccagccggccctgggcctcgtccatcttcagcagtacggccgctgcgccgctgtcggagatcggccacgccttgcccttgtcgtcgatgatctcgatgcgtgcctggcgcggcagtgcggcgaccagtgcatcggtctgtgcctgctgcaacaacacgttgtccccgtcgccggtgtcgtgcaccgggcccaggtccttgccgttcaggcgcaggcgcagcgccccggtcggcgtcgggctttcgccatcctcgccattgcgcagccgcgcgagcaccttcgtacccgggccgcccgggcgttccagcatcaggctgagcagactgccgggttcttccgggctgtagccggcggcgcggcaggtgcgggtgttgtcacaggccagcgaccagtcgttgtgctggaactgcacgccggccttcggttcgggtgtagcggcgtgggcggccgtggccagggcgaggcccagcagcgcgggaaggagcgtgcgatgcatgcgttgaagtccatttccgggccgacaagcatggaagatatgctggcagattccaaatgctcgcgatcaggggggagcccctgcgggcagagaggtccgaccccgcgctatcatggggatgtcttccgcaacccggcgatgccgatgtcccttgccgccgatgctgcgcagccgtcctctgatacgccgatgatccgccgccgcgatgcggtcgtacccggcagctggccagagggaacgctgccactgctggcgcgactctacgccagccgcggcgccggtacgccagagctggcactgccgaagctgggcagcccccacgcgccggagctgctgaccggcatcgatgatgcggtgggtctgctgatcgaggccatcgccaatgacaagcgcatcctggtggtcggcgatttcgattgcgatggcgccaccgcctgtgcggtcggcgtgcgtggcctgcgcatgctcggcgcgcagcatgtcttccacgcggtgccgaaccgaatggtgcacggctacggcctgtcaccctcactggtggaggagctggccgagctgcagccggacctgctggtcacggtcgaccacggcatcgcctgccatgcgggcgtgatcgcggccaaggcgcggggctggcaggtgctggtcaccgaccatcacctacccgggccgcagttgccgccggccgatgtcatcgtcgatcccaatctcgacgatgatgccttccccagcaagtcgctggccggcgtcggcgtgatcttctacgtgctgatggcgctgcgccggcacatgcgcgaggccggcgtcttcgccgatggcaaggggccggacctgaccacgctgctggacctggtggcggtcggcaccgtcgccgacctggtggcgctggatccgaacaaccgggcactggtcagcgcgggcctgcgccgtctgcgcgcggggcagggctgtgtcggcctgcgtgcgctgatcgaagccagcggccgtgatgccgcgcggctcacagccaccgacatcggcttcgcgctcggcccgcgcctgaatgccgcgggccggctggaagacatggcgctgggcatcgcgctgctgctgaccgaagacccgcgccaggcgcgcgagatcgcgcagacgctggagcagatcaattcggaacggcgcgccgtgcagcagtcgatgaccgatgacgccgagcaggcgttgacccgggtagtgctggacatggccggtcagcgaccggtggcggcctgcctgttcgatgccgactggcatccgggggtggtcggcctggtcgcgtcgaagatgaaggaccgcctgcatcgcccggtgatcgccttcgcgccggccgaacctggcgccgacaccctgcgaggctcggcgcgctccattcccggcctgcatatccgtgacgcccttgcgctggtcgatgcgcgccatccgggcctgatcgaacgcttcggcggccacgccatggcggccgggctcagcctgcggcgtgaccacgtcgatgacttcaaggccgccttcgtcgccgtggtgctggaaatgctcgacccggcggcactgcagcagcaggtcctcagcgacggtgagctggccgccaacgaactcgatcatcgccatgccgatgcgctgcgtctggcagggccgtggggccagggcttccccgagccactgttcgacggccacttcgaagtggccaactggcgcgtgctgaaggagcgtcacctgaagctggaactgcgcctgcccggcgtacccggcacgatcaacgccatccatttcggcggctggcacggcaacgcgcccggtcgccatgtgcatctcgcctatcgcctcgcctgcgacgactatcgcggcggcagcgccatccagctgatcgtggagcactgcctgcccgcatagaaaaaggggacggaggggattaagtcgcttgtgcctcgtttgccacttgcgacttaatcccctccgtcccctttttgggggcgccaaccccattacggtcgctggtgcgttcaaaggttcacgatcccactggagtccgctcatggtcttcgtccgttgctgcactgtgttgttgctggccctcgcggcctggcccgctggcgcacagtcgccgacgatctcccggccgcaggccgccacgccgctgctgatcgcgccggcggctgagcagtcggttcaattacgacacgcccgcatcgaaggcgaagtccaggccggcatcgcccagacccggatcacactggaattccacaacccgaaccggcgcgtgctggagggcgagctgcagttcccgctggccgacggtcagcagatcagcggcttcgcgctggatatcaacggcgagatgcttgacgcggtgccggtgcccaaggaccgcggtcgccaggtgttcgaggagatcgcccgccgcggcgtcgacccggggctgctggaacagaccgctggcaaccagttccggttgcgcatctacccgctgccggccggcggtagccggcgcgtggagctggtgattcgcgagccgttggccttcgccggccaaggctggcagtggacgctgccgctgcagttcgccgccggtgcagcctcggttgagctgaaactgcaggcccccgacacggccaccgcgggtacggcgccattccgcatcagcgcgggccagctgcagtggcagggcaggggcgcgcagctgccgcagcagctgcagtggagcctgccggcagcccgacaggcacaggtgcaggtggcgccctggcaggacggccattacctgttggcgcagctgccggtggtggccagcagcacgccgcgcacgttgcccagcgagatcgggctgctgtgggacggttccggctcggcgggccagcgcgatcgcacacgtgagttcgccctgctggatcgctatttcgctgcgctgggtgacggcagcgtggcgttgaccgtactgcgggatcgcgccgagccggtgcgtcgattccgtatccgcgccggcaactggagcgagctgcgcgcagccctgcaggccgtgcgtccggacggcgccagcgcactggcgcagtggcagccgcagccgggcgtgaaggaatacctgctggtcagcgatggcctgctgacctatgggccggaacagctgccggcgatggcgccggaccaacgcctgtttgcggtcagcagcgccggtgcgcgcaccgatgccgtgcgactgcgtggctggagcgaagcgcatggtggtcgcttcgtagcgctggggaaggatgtcgaattggccgcccgtgagctgctgtcgtcgccgctggatgtgcaggtcgatgcagggcgcggcgtgcaggacgtggtgatcgatcgtcgcagtgaagcccagggctggttgtggctgcatgcacgactggcggccgacggtgtgccgatgcgggtgcgcgtgggtggcggcgaatggcaggcgctgcccgccacgcagaagagcaacgacggagaactgctggcgggcttgtgggcgcaggcgcgcctgcagcagctggccgccgatcgccgtggcaaccgcgaggcgatgcagcgcctgtcacaacagttcggcctggtcgggccggatacctcgctgatcgtgctggagacgctggaggactacctgcgctatgcgatccgcccttcgggcacgttgcgcgccgagtacgacgccaggtttgcagtgcaggtaagtgatcgcgccgcagccgatcgccagcgcctggatgaagtggccgctcgctggaaggagcgccagcagtggtggaaccgcagctggccgaagggtgtgccgccgcagccgaagggcggggcactcgaagtggcctccgcggactacgcgatggaatcagcgccggtggcgatgctcgccgcgccggccccggcggcaccacccgccccggcaccgatggccgccgccgccgagcagcgcatggaagccagcagcgcgcgtgcgcgtcgctcagcgcctgcatcgaacaaggcgctggatgcgatcgcggtcaccggtgggttcgccgacgcatctgctgccgccaacgacggccaactcggcatccagctggcggcctggcagccggactcggccatcgcccggcgcctgcgcgagggcccgccgtcgcaactctacgaccgctatctggccgagcgcgatgcccacgccgacagcagcgcgttcttcctcgatgtggccgacctgctgcgggggcagggccagcgcgaactggcactgcgggtactgtcgaacctggccgagatggatctggacaaccggcatctgctgcgcgtgctcggctaccggctgatgcaggctgatgccccggcactggcggtgccggtgttcgagcaggtgctggcgatgggccaggaagaaccgcagagcttccgcgacctgggcctggcgctggcagcggccggcaagccgcagcaggcgctggcgccgctgtaccaggtggtggtgcggccgtgggacagccgcttcgatggcatcgccctgatcgcattggatgagctgaccaacctggtggcgcgcagcacgccacggctggatacctcggccatcgacccgcgcctgctgcaggcaatgccgctggacctgcgcgtggtgctgtcctgggatgccgacaacagcgacatggacctgtgggtgaccgacccgaacggcgagcgtgcctactacggcaaccgccagacctaccagggcgggcggatgtcgcaggacttcaccggcggctatggccccgagcagttctcgctgcgcaacgccaagccgggcaagtacaaggtcgaggcgaactatttcggcagtcgccagcagctggtgaccggtgcgacgacgctgatgctgcgcctgaccacccattggggcacggcaaagcagaaggaccagatggtgacgatgcggctgaaggatcgcgccgaaaccgtgctggtgggcgagttcgaggtgcgttgatcgctcgggcacccgtgtagagtcgagctggctcgactgccttgatgtagcgccgggcacatgcgcggctcatggcagaggcagccgagcgcgggctcggctctacactactgcggtgcgcgccattggcggcgctggcggattcgcacgcaggccgaacaggggccgcagccaacgcacgcgacggatcagcaactcatggatcagcaggcagccgccgacagtaccggccagcagcagggccggttccatccacgggcccaactgaagtggcttgagccagaacaacagcacgatgatcaggctctggtgcagcatgtaccagggatagatcgcctcggtgcagtacggcagccagcggaacgggcgatcgaggaagacctttccccagccgaggatggccagcagcgcggtccatacgtaaagcgactggctggcccggccctgcaggtcccagaacggttcgggccattgccgcagcggggaatcggcgggcaatacctggccgaggatgcgcaaccccagataccagccgacggcagccagcgccagccatagcgtggtgcggcgcagggcgaccacgcgctcccagaacaccggttcacgacccagcaggtagccggccaggaacaccgtggcgtacttcgcgtgctggtaccagtcgccgagcagggcattgatggacgggtagatcggctccagccagatcacccaggccagcagcagggcggacggaaggccgatcagcagcatcggcgatgctgcgcagagcgccatcgcgcggcgaaccaccgccgttcccagcaatggcatcaacagggccaaggccagcgtgtagttccacagataggccaggtaccacaggtggttccaggtgatgccgtactgccagccggcgaagctgccttccggccacggtcgcacctgccagtagcgcagcaggaactggccgaagccgggcgccacgtggccgttggccacgccttcgcaatagggctggatcggcacgatcacgaacatgccgaacagcagcggcagcagcagccgccaggtgcgcaggccggcgaagcgcagcaacctgccttccggccgcatcagcgcgatggcgatccccgagatcaggaacagcagcgacatccgccagcggttgacgaacagcatcggccactgcagccattcggcggtatgcacgctcttgaggtgaaagccccagtcgtccacgtaggccatggcggtgtggtagaggatcagcagggcgaaggcgaacacgcgcagggcgtcgatgtcgtagcgtcgggtcatggtggtggtgtgccggagagtcgagccaaggtgacgccgcccggtccgtgcggcgactggcaaggggccgctggaaccgacgcagtgaccaatggcgggggtggtgggatcaatggagacgctaccctttgtcccttgaggcaggctggagcaccgcaacgacatggatgcagcaatgacccagggccgaccatcgcgctggcgtacttcaacccgcctgctggtatgggcggcgatcctgtcggcctcggcagtgaccaatgcgctggtggaagtgatggacgccagtcgccgcggcgccgatctcgggctgtgggagccgatgatctgggagttcagcagcctcggcctggtcctgttgaccctgccgctgctgtggtggggctgcgagcgctggccgctgcatgccgatacctggaagcggcgattgccgctgtatctgctggccagcgtcggctggtcgctgctgcacgtggtggggatggtgctgctgcggcacctggcctacgggtcgctgggccatcgctaccaggatgatgccggctggctggagcgttttgcctacgaatacctgaaggatgtacgcacgtttgcgatgttcgtggcactggagcactttgccagctggttcggccggcgcaggcagggcgaggcgagcctgctggccgagccggacgtcggcccgccggtggagccggtcgagcgcccccagcacttcctggtgcgcaagctgggcaaggagttcctggtcgccacggcggacgtggagtatgcccaggctgcggggaactatgtgaacctgcgggtacgcggccacgactatccgctgcggatcaccatggcggtgctggagcagcggctcgacccgggcgagttcctgcgcccgcaccgcagctggctgatccatcggggccagctgcgctcgatcgagccgctggacggtggcgaggccctgctgcacatggccgacggggcgaaagtgccgtgcagccggcgccagctgccgctgctgcggcaggcgctgggggcagggtgaggccctcattccgggcacccgcagcctgcggtatcattaccagtcatcttttgaatgcataaccgccgacatgatcgaactgaatcctgtccgccagcgcatcaccgatctgaccgatcgcgtgctgtcgcttcgggggtatctttgactacgacgccaagaaagagcgtcttgaagaagtaacgcgggagctggaaagccccgacgtctggaacaacgccgagtacgcccagaacctgggccgcgaacgttccagcctggaaaagactgtgggcggcatcgcctcggtgctggatggcctgaacgacgccaccgagctgctggagctggccgagtccgagcaggacgaggacaccgccctggccgtggtcgccgacctggacaagcaccaggcccacgtggagaagctggagttccagcgcatgttctccggcgagatggacaatgcggcggcgttcgtcgacatccaggccggtgccggcggcaccgaagcccaggactgggccgagatcctgctgcgcatgtacctgcgctggtgcgagtcgcgcggctggaagaccgaactgatggaagtgtccggtggcgacgttgccggcatcaagtcggccacgctgcgcgtggaaggcgactatgcctatggctggctgaagaccgagaccggcgtgcaccgcctggtgcgcaagtcgccgttcgactcggacaaccgccgccacaccagcttcacctcggtgttcgtgtcgccggaaatcgacgacaacatcgacatcaccatcaacccggccgacctgcgtaccgacgtgtaccgttcgtccggtgccggtggccagcacgtgaacaagaccgagtcggcggtgcgtatcacccacatcccgaccaacatcgtcgtggcctgccagaccggccgcagccagcaccagaaccgcgacaacgcgatgaagatgctggccgccaagctgtatgaactggagatccagaagcgcaacgccgagaaggacgcggtggaagccaccaagtccgacatcggctggggcagccagatccgcaactacgtgctcgaccagagccgcatcaaggacctgcgcaccggcatcgaacggtcggacacgcagaaggtgctggacggcgacctggacgagttcgtcgaggccagcctgaaggccggcctggccgtgggctccaagcgcgtcgatgcctgatcggcgcgcctgcgcggatatcgtcaccctcgtgcgcaacgccgagggtggctgatcacgcttccgatgtggggccgagcccatgctcggctgctgttggcgcagtagcagatgcgtcgagcatggctcgacgctacaacgggtacggcggtagcgatgatgcgcagcgaaagtgaacgcaaggaactcggcggctttctcaaggcctgccgtgcccgtgtcgatcctgccacgctcggcctgccggccgggcgccggcgtaccccgggcctgaagcgcgaggaagtcgcgctggcgatcggggtgagcgtcagctggtacacctggatcgagcagggccgtgaagtgcgcgcctcgcccgaggtgctggagcgcctggcgaaggtgctgcgcatgagcgacgacgaacgcgcctacgcgttcgcgctgtccggctacggcgtgccgctggaatcaccggacgagagcgtgactgacggcttgcgccagctggtggaggcgatgcagccgatcccggcctatgtgcgcaacacccgcttcgacatcctggcctggaacccggccatcgccgatctgttcgtggactacagccaactggcgccgcatgagcgcaacacgttgcggctgatgttcctgtacgcgccataccgcacgctgattctcaactgggaagaaatgacccgcggcctgctggcaggcttccgtgcggcgatggcgcaggcgccggacaaggcgccgttcctggcgctggtggaggacatcgcggcgcatagcgaggagttccgccagtggtggccggagcacgacgtgcgtcggttcgatgaaggggcgaagaagctgaaccatcccacgcgcgggttgctggacctgcagtacgtggcgctggtgccggagagccggcatgacctttccctggtgacttacctgccgcgaaagtaggggtgttcggcagggcttgcagccctgcacctgctcaatgcaacggccaaagccagagccagagctatgttccgtggtttggcggggcggtgtcggcgtgcggggacgccgcaagtacgtccgtgtaggcttggcagccgcatccatgcggctgacaccccgcacgccgacaccgccccaccttcgacaggttcacgcggctgttggcaactgcggctttgttccgcgcggctgttggtaggtgtcgaccttggtcgacacgatttttctctcagatatcgaatgagtcatccacggatggcgtgggtctactgtgtcgaccaaggtcgacatctaccaacagcaacgcagagcgccgccccgacagatcgcggaaaaccgtcgaaggcggggtgggtccggttgcgggagtgtccgcggcatggatgccgcggccaagcccccaaggacgggtttacggcgtctccggcaaccggacccacctcgccatcccacagatagcccgctgttgctgctgcttcggctgttgcagttgcctctgcgggtgcagggcgcagccctgccaagagcccccattcagacaggtaagtgcaggtcacaggataagcagacgccttgttgcctccgccaatcgggtccacattcctgtgcaggagacgggccgccgcccgtcgtcgagacaccaggagacctgcatgtccgctgcccccaccaccgccatttcccgcgatccggctaccggccagcagatcgccagccatcccttcgccaccgatgccgaactggatgcgatcctcgagcgtggccaggccggcttcgccgcctggagcgccagcagcctcgaacagcgggccacagtgctgcgtgcaatggccgccgtactgcgccgtgaccgtgaaaagctggccgcgctggccactgccgaaatgggcaaggtccaggccgaagcactggccgagatcgagaagtgcgccgtgctgtgcgactggtacgccgaccatggcgcgcagttcctgcgcgacgagccgacccaggtgcccgacgacaaggcttacgtgtcctacctgccgctgggcgtggtgctgggcatcatgccgtggaatttcccgtactggcaggtgatgcgcgcggcggtaccgatcctgatgggcggcaacggcttcctgctgaagccggccgagaacatcgtcggcaccgcgcagctgctcgatgccgcctggcgtgatgccgggctgccggaaggaaccttcatcgccgccaacatcagccgcgagggtaccagccgtgcgatcgccgatgaccgcatcgccgccgtcaccctgaccggcagcgtggccgcaggccgcagcatcgccgcccaggccgggcaggcgctgaagaaggtggtgctggaactgggcggctcggatccgttcatcgtgctggccgacgctgacctggatgcggccgtcgatgcggcggtgacctcgcgcttccagaacaccgggcaggtctgcattgccggcaagcgcatcatcgttgaagacgcggtgtacgaccgcttcgtggcgcagttctgccagaaggtgcaggcgctgaccatcggtgatggccgtgaagcgggcaatcgcattggtccgatggcacgccaggacctgctggaacagttggacgcgcaggtgcgcgcctcggtggacgcaggcgcgaagctgctcgtcggcggccatcagctcgatcgcccgggcgcgttctacgcgcccaccgtactggcggacgtagagccgggcatgcaggcctttgacacggaaacgttcgggccggtggcctcgatcagccgcgcccgcgatgccgaccacgcggtggaactggccaaccagagcgagttcggcctcagcggcaacctgtggaccggtgaccgcgcacgggccatgcagctggcgcgccggctgcagaccggcggtgtgttcgtcaacggcttctccgcttccgaccctcgcgtgccgatcggcggtgtgaagaagagcggcttcggccgcgagctctcgcacttcggcatccgtgaattcgtcaacgcgcagacagtgtggttcgacaagcattgacgcgcggctctcatccttcctgcaacgatccaccatcagtccagcacaaaggacggcatccgatgtccaagggttcagatctgctcgtcgccgcacttgagaacgaaggcgtcgagcgcattttcggcattcccggcgaagaaaacctcgacgtggtcgagtcgctccgccattccagcatcgaactggtcatcacccgccacgaacaggcggcggtgttcatggcggccacttacggccgcctgaccggcaagccgggcgtatgcctggccacgctcggcccgggcgcgctcaacttcaccaccggcgccgcctatgcgctgctgggtgcgtggccggtgatcatgatcaccggccagaagggcatcgtcgccagcaagcaggcgcgcttccagatcgtcgacatcgtcggcacgatgaagccgctgaccaaacaggcgcggcagatcgtctcggcacgcaccattccgaccatcgtccgcgaggcgttccgtgtcgcccaggaagagcgcccgggcccggtgttgctggagctgcccgaagacattgctgccgatgaggtcgagggcgtggcgctgattccgccgcacgcggtggaccgtcccattgccagcccggaggcgctggatcgggcagcagagctcatccgcaatgcaaagcggccgctgctgatgatcgcttcggcggcctcgcggccgcagtccagcgacgcgctgtccgcgttcgtgctgcgcgccggcatcccgttcttcaccacgcagatgggcaagggcgcggtggccggtggttcaggcctgtacatgggcaccgcggcgctgaccgagcgcgattacgtgcacatggcgatcgaccaggccgacgtgatcgtgaccatcggccacgaggtcaccgagaagccgccattcgtgatgcgcccgggtgggccgacggtgatccatatcgggtactcgcaggcggcggtggaacaggtgtatttcccgcaggtggaggtgatcggcgatatcggtcgttcgctgacccagctggccgaccgcatcgagggcgcggtgccgaatgccgctgcgctgctgccgctgcgcgcgaccatcctcgagcacctggccgaccgggccgaagaggccgggttcaccccgcagcggctggtgcacgacgtgcgccaggtgatgccgccggatggcatcgtggcgctggacaacggcatgtacaagatctggttcgcgcgcaactaccgcacccaggtggccaacacgctgctgctggacaacgcgctggcgacgatgggcgcgggcctgccgtcggcgatcatggcctcgatcctgtatccgcagcggcgggtgctggcggtgtgcggcgacggcggcttcatgatgaacagccaggagctggagacggcccgccggctgggcctgaacctggtggtgctgatcctcaacgacggtgcctacggcatgatccgctggaagcaggccgtggacggattcaccgactacggcatgaccttcagcaaccccgatttcgtgaagtacgccgaggcctatggctgcaagggccacgaggtgacggccatcgagcagttcatcccgaccctggaagcggccttcaacgagggcggggtgcacctggtgtcggtgccggtggactattcggagaaccagcgggtgctggtggatgagttgcgccaggcgttccccggcaacaggtagcggcggagcagggccggccgatccgcccggtaggtgtcgaccttggtcgacacgcacggcgccaaccaaggttggcggctaccggggcgggcccggcccagggctggggctgggcggttttggtatgctgggcaaccggctgtgccgggcgctgcatcccccctcactacacgattcccgcagatccatgagcgaagctaccgataccccccccgtcgacgaaaacaagttgatcgccgagcgccgtgagaaactcaaagcgctgcgtgggcagggcatcgcgtacccgaacgacttccgtcgcgaggacttcgccggccgcctgcaggaagaattcgcagatgccgaaacctggaccgccgaggccctggaaggcaacggccgccaggtgaagatggcgggccgcctgatggccaagcgcatcatgggcaaggccagcttcgcgcagatccaggacgagtccggccgcatccagctgttcctgcagggcgcggtgctgggcgatgcctataccgccttcaagggctgggacgtgggcgacatcatcgccgtcgaaggcggcctgacccgtaccaagaccggcgagctgtcggtcaaggccgaatcgatccgcctgctgaccaagtcgctgcgcccgctgccggacaagtggcatggcctggccgacgtcgagcagcgttaccgccagcgttacgtcgacctgatcgtgaccccggagtcgcgcgcggtgttcatcaagcgctcgaagatcatccgcgccatgcgcgcgtggctggacaaccgcgacttcctggaagtcgagacgccgatgatgcattacatccccggcggcgcggcggccaagccgttcaccacccaccacaatgcgctggacctggacctgtacctgcgcgtggcgccggagctgtacctcaagcgcctgaccgtgggtggccttgagcgcgtgtacgagatcaaccgcaacttccgcaatgaaggcgtcagcacccgccacaacccggaattcaccatgatggagctgtacgaggcctatgccacgtacaacgagatcatggacctgaccgaaggcgtgatccgtgacgtggccaaggccgtcaacggtggcaccgaggtcgaatgggacggcgcgaagatcgacctgggcccggcattccgccgctggcgcatggacgaggcggtgcgccaccacaatccggaaatctctgcggcggactgcaccgaccgcgacgcgctgctgcgccattgcgagcgcctgaagatccgcgtcaagccgtcctacggctggggcaagctgctgctggagatcttcgaggccaccgtcgagcacaccctgatccagccgaccttcatcaccgaccatccggtggaggtctcgccgctggcccgtgccaacgacaatgacccgggctacaccgaccgcttcgagctgttcgtcaacggcaaggagctggccaacggcttctccgagctgaacgatccggaagaccaggcccagcgcttccaggcccaggtggcggcgaaggaaggtggcgatgacgaggccatgcactacgacgccgactacatccgtgcgctggagtacggcatggcaccgaccggcggcctcggcatcggcgtggatcgcctggtgatgctgctgaccggcagcagctcgatccgcgatgtactgctgttcccgtacatgcgtccggagcagtaagtcgcctttttgactcccgattgtgcgcgccgtcccgaaacgagacggcgcgattgacgcgtcccgcactcggcgtatcgtaattgcactaccttgacgcctgttatggcttgatcggcgccagggggagggcacggtgtggggagtccgcttcacattgtgatgacgatcatgaatcgggacgcatgacacgggagtcaggccgatgcagggtgcgagcgttcgcagcggcagagtatcctcgcctgctgatgatccagcgtggtcgagaaaccaggcagagtacgcgttgaacatcgtcatcgttgacgaccagacttcggcccggacgatgctgcgtcacgtcatcgaagacatcgcgccggaactgagcgtgtatgacttcggagacccgctgaccgcattggcctggtgcgaagcccatccggtcgacctgctgctgctcgattaccgcatgccggagatggatgggctggaattcgcccgtcgtttccgtcgcctgcccaagcaccgtgacattccggtgatcctgatcaccgtggtcggtgacgagccgatccggcaggcggcactggaagcaggcgtcatcgacttcctggtcaagccgatccgcccgcgcgagctgcgggcgcgctgctacaacctgctgcagctgcgccagcagaccgagaacgtgaagcagcgggcgctgtcgctggagcagcgcctgctggccagcatgcatgaggtcgaagagcgcgagcgcgagacgctgtcgcggctggcacgcgcgatcgagttccgtgatgccggcaccagcgcctacctggagcgcatggcgcgcgtggccggactgatcgccgaacagctcgggctgcccgaagaggaggtgcgcctgatcgaaatggctgcgccgctgcatgacatgggcaagatcgccattcccgatgcggtgctgctcaagcagggcaagctcaacgaggaagagctggcgatcatgcgccggcacccgcggattggccatgaactgctgagcggcagccagaatcgcttcatccaggttggcgcgttgatcgcactgcgtcatcatgagcgctacgacggcagtggctatcccgatgggctggtcggcgacgcgattccgctggaagcgcgcatcgtggccgtcgccgatgtcttcgacgccctgatttcgccccgtccgtacaaggaagcatggaccatggaagccaccctggcttatctctacgcccagcgtggccgcctgttcgatccccgatgcgtggacgcgctgctgcgcggccgcgaacagctcgaccagatctgcgccgagcattcgatggcgtccgcgcgcccggggctgggcgcgtgaaacgcctgttgtcgcagctgcggctgcgcctgtcccagcgccaggacagcgagcacggccagcagatcgtccgcatcgtgctgatcagcctgatcctggcctacgtactgttgccggcaccgcgccacgatctgccgcatacccagtacgtcggtgtgctggcgattgtgctgaccggcctgagcctgtcactgttgctgttcggctggctgctgtggcggccggcgcgttccgatccccgccgcgtgctgggcatgttggctgactacggcctcattgctgccggcatggtgcagatgggtgagccgctggcctgggtctacatcgtggtgatgtgggtgacggtcggcaatggcatgcgctttggcaaccactatctgtacgtggcggtggccatggcgatggtgagcttcggttgcaccgtgatgctgacgccttactggcaacagaatttccgcctggccatcggcctctggctgggcctggcagcggtgccgctgtacttctcgacattgctgcggcagttgaccgaagcgatggccgaagcgcgccgcgccagcgaggccaagagccggttcctggccaacatgagccatgagttccgcacgccgttgaacggtctcaacggcatgaccgaagtgctggccaccacgcgcctggatgacgagcagcgcgagtgcctcaacaccatccaggcgtcgtcgcgcagcctgctggcactggtggaggaagtgctggacatctcggccatcgaggccggcaagctgcgcgtggtggccgaggacttcgccgtggccgacgtgatccaggcgatcggtctgatcctgttgccacaggccaaggccaaacggctggattaccgggtgaaggtggccgatggtgtgccgccacgcgtgcgcggcgatgtcgggcacctgcggcagatcctgctgaacctggccggcaacgcggtcaagttcaccgaccatggccgggtcgagatacgtgtcggcgtggtgcaggccgatgccagcggggcggtgcggttgcgcttcgacatcctcgacaccggcatcggcgtgccacctgccatgcgtgcacggctgttcgacgcgttcgagcaggccgatgtcagcatggcgcgccgccacgaggggacggggctgggcacgaccatcgccaagggcctggtcgaggcgatggacggtgacatcggctatctggaaaacccgccgcgcggcagccacttctgggtcgagctgccgttcgcgccgccgcagccgcaggtgccgggcgcggtgccgagcctgagcggtgacgaagacgcgggcccgggcggcaacgtgatcgcttttgccgatccgttcctgcgccatcgcgcccgcgtgcgcagcatgcagatcctggtggccgacgaccacgaggccaaccgcatggtcctgcagcgcctgctgcagaaggccggccatcgcgtgctgtgcgtggacggcggtgaggcggtgctggatgcgctggccgacagcgagttcgacgcggtcatcgtcgatctgcacatgccgggcatgagcgggctggacatgctcaaggaactgcgggtgatgcaggccggcggcggtccgcgcacgccggtactggtactgagtgcagatgtaacgcccgaggcgatccagcgctgtacccaggccggcgcacatgccttcctggccaagcccgtcgttgcggtgcgcctgctcgatacgctggccgagatcgccagcaatgcccagctgaagaccatggccgcaccggtggtgcgaccggcggcgccgctgcaggatggcgtgctcgacagcagcgtgctggacgaactggcttcgctgggcatgggcgagggcttcgaacgtgagttcatccgccagtgcctggaggacgtggcgagctgcatgggcaaggccgagcaggccggggaggccacgcagtgggatgtgttccgcgaacaatcccacgcgatcaagggcgtggccagcaacctcggcctgatgcgcgcgtccaaccgtgccggcgagctgatgcggatggccgactggcagctcaagaccgaatggcgtccgcgcctgggcatcctgcaggaggcgatcaaggaaggccggcgcgcgctggacgcgcgggccgaacgccgactgcgcggcgccgccgatgatggtgaagcgcgctgaggcgtggcgtggacccaaaaaaagcccggtggccagccgggcttgaacccatcctgggggaggggaggaatcaggccgcgtcgagactggcgcgacgggtctgggccttgatcaggcgatccatggtgcgcagcgagcggtcgccgagtgcaagggcggaatcgacccataccttggtgatctccagcagttcgtcgtagctgaccggctgggcgatggcgcgtgcggcattcatcgccagataggactgcggcgtgcgctgctgctggcggatcagttcctcgaccgccgcccggccttcgcccttcttcaccagcacgtcgaccacgcccatggcatgcatctcctcggcactgtagacgcggccgtcgaggatgatcttctcggccagatggggggacacgcgccggcacaggaaggagtacgcacccatgcccgggaacaggccgaacagcacctccggcaggcccagtccgctgccttcctcggcgacgatggtgtggcaggccagggccatttccaggccgccgccgagggcgtcaccctggatcagcgcgatcgaacggacgtcgccgccgaacccggtgtgcaggtggtgcacgccctccacgcagcgctgggcgtagttcagcaggaggtcgcggttgccctcgcggatcaggcgggtgaacaggtccaggtcgccgcccaggttgtaggcgacggcatcggaggccagcacgaaatgccgcaatgttccgttgtggcgttcggcagggctgcgggtgatggctgccatgtagctccacatttcgtcgagcatgtccttgcggcagcaggggcggatcccggtggcggcatcggcgtgcatgaacagccagtgggcagcgccgtcggcgctgtcttcggtacggatggtggcgaacggtgagccgcttgaaggcagcttttcgatggtactcatggaagggtcctcggcatgcggcccgcagtgtcaggtgggtggccggcgggccgaacggtccacacacgcggcgatgctacaccgcctcagcggcgtcgcatgcgaaagggcccgggacgtttccgccccgggccctgcactgtccagattgccgcaaacccttactgggcgggcgtatcgcggagttcgcgacggaggatcttgccgacgttggtcttcggcagctcctttcggaattcaacgattttggggtgcttgtagccggtcaggttggcccgggcatgctccttgaccatttcggcggtcaggttcgggtccttcttcacgatgaccaccttcaccacctcgccggacttgtcgtccgggacgccgaccgcggccacttccagcacgcccggcatcatcgcgatcacgtcctcgacttcgttcgggtacacgttgaagccggacaccaggatcatgtccttcttgcggtcgacgatgtagaagaagccgtgttcgtccatcttggccatgtcgccggtatgcagccagccgtccgcgtcgatggccttggccgtttcctccgggcgctgccagtagcccttcatcacctgcgggcccttgatgcagagctcgccgacctcgcccagcggcaggatggcactgttgtcatccttgatgcaggcatcggtggaggggatcggcaggccgatcgagccgttgtactcggtcagggtaagcgggttgatgcaggctgccggcgaagtctcggtcaggccataggcctcgaccagggtcacgccggtgaccttcttccagcgctcggcgacggcgcgctgcaccgccatgccgccgccgagggtgaccttcagcgaggagaagtcgaccgtgtcgaaaccgggggtgttgagcaggccgttgaacagcgtgttgacgccggtgatggcggtgaaacgcaccgacttgagctccttgacgaagcccttcatgtcgcgcgggttggtgatcagatggttgcacccaccgaacttcatgaagaccagcccgttcgcggtcagcgcgaagatgtggtacagcggcagggcggtgatgatccactccttgcccatctcgatgccggacgcactgatccaggccgaggcctgctgcatgttggcgatcaggttgcggttggtcagcatcgcgcccttggccacgccggtggtgccgccggtgtactgcaggaacgcgatgtcgtcgtggtcgatctcgaccttgggcaggctgtggcggctgccgagcttgagcgcctggcggaagcgcaccgcgcccttgagatggtagttgggcaccatcttcttgatgtacttcagcacgaagttgacgatcacgcccttggcgccgagcaggtcgcccaggccggtggtgaccacatgcttgaccggcgtatcggcgatgacctgctcgacggtgtcgccgaagttgtcgaccaccaccagcgcggtcacgccggcatcgaccagctggtgcttgagctcgcgggcggtgtacagcgggttgacgttgaccacggtcaggccggcgcgcagcacgccgaaggtggccaccgggtactgcaggcagttgggcatcatcagggcgacgcggtcacccttcttgagcttgagctcaccgagcaggtaggccgcgaactgttcgaccagcgcgtcggtctcgccgtaggtgaggaccttgccgaagctggagtaggcgggacggtcgcggaatttcgcgacggaagcgtcgaagaccgaagctaccgaatggaactcgttgacgtcgatctcggcgggaacgcctttcggatagctctgcagccagggacgatccagactcatattccccctccaggaatcgtgatgtattaggtccggccctgagcgtatcgacaacggccggtcattgcagcataccccgccgtagggaaaacgcgaagaggccccgaagagcctccttgctgggtagtgccggccgctggccggcatctgcgctggacggaccatacgatggatgccggccagcggccggcactaccgtggccccaaacgggccggctgcgtcaaccctgcttgcgaacgggtgcgccgttggccttgtagtacggcgcggtgctacgggcgagcggggtgcggccgcggatcacgtcggccagcttctcggccatcatgatggtcggcgcgttgaggttgccggtcaccacctgcggcatgatcgaggcatcgacgatgcgcaggccttccagcccgtgcacgcggccctggccatcgaccaccgccatcggatcgtcggcatggcccatcttgttcgagcacgacgggtgataggcagtctcggcgtgctcgcgcacgaacgcatcgatctgcgcgtcggtctgcagcgcgcttcccggcgagatctcgcggccgctgtacggggccagcgccggctgcgcgaagatctcgcgggtgatgcggatcgccgcacggaactcgcgccagtcctggtcgtgcgacatgtagttgaacaggatgctcggatgttcgcgcgggtccttcgagcgcacgtggatgcggccgcggctgggtgagcgcatcgaaccgacgtgcatctggaagctgtgcgccttgatcgggttggagccgttgtaattgatcgccaccggcaggaagtggtactgcaggttcggccagtcgaattcggcgtcgctgcggatgaagccaccggcctcgaactggttgctggcgccgatgccggtgcccaggaacagccactcggcaccgatcgccggctggttgtacagcttcagtgccggcgccagcgacaccggcttcttgcactcgtactgcaggtacatctcaaggtggtcctgcaggttggcgccgacgcccggcaggtggtgcaccaggtcgatgtccaggctgcgcagcaggtcggccgggccgacgcccgagcgctgcagtatctgcggcgaggcgatggcgccgccgcacagcagcacttcgcggcgggcggtggcgcgctgcggctggtcgctgtgcagccactgcacgcccacggcgcgcttgcccgagaacaggatgcggtcggtcagcgcgtgggtgacgatggtcaggttcgggcgcggcttggccaggtccaggtagccgcgggcggtgctggaacgacggcccttcggggtcaccgtgcggtccatcgggccgaaaccttcctgctggtagccgttgaggtcgtcggtgcgcgggtagccggcctgcacgccggcttcgaccatcgcagcgaacagctcgttgttgccggccttgggcgtggtaacgcgcagcgggccgtcgccaccgtggtagtcattggggccgatatcacgggtttcggccttgcggaagtagggcaggcagtccaggtaggtccagtcttccaggcccggcatgctggcccagttgtcatagtccatcgcgttgccgcggatgtagcacatgccgttgatcagcgacgagccacccaggcccttgccgcggccgcagtccatgcggcggttgttcatgaagggctcgggatcggtcttgtacgcccagttgtagcgcttgccctgcagcgggaaggccagtgccgccggcatctgggtacggaagtcgagccggtagtccgggccaccggcttccagcagcagcacgctgacatcggcatcttcggtgaggcgggtagccagcacgttgccggccgaaccggcgccgatgatgatgtagtcgtactcgttgtgggtgctcatgggtgtctcctgcaggccggggcgcgctgcatgcaggcgtcccggcgggatgtcggatcggcgcggtggccggacgatggggcgtgctggcggcgcgccggtcagaacacgctggcgtagtcgcccagctcgacctgcaccgacttgatgcgggtgtagtggccgagggtcgagatgccgttctcgcggccgacgccggattccttgtagccaccgacgggcatttcggccggcgattcgccccaggtgttgatccagcagatgccggcttccaggcggtggatgatgcggtgggcgcggctgacatccttgctgaccacgccggcggcgaggccgaaggtggtgtcgttggcacgacgcaccacttcgtcttcgtcgtcgtaggcgaggatgctcatcaccggcccgaagatctcttcccggacaatcgtcatgtcatcgcggcagtcggagaacacggtcggcagcacgtacgcgccattggccagcgcgccttcggtggcacggccgccgccggtcagcaggcgggcgccttcggccttgccgctttcgatgtagcgcagcacgttttccatgtgcgggaagctggtcagcgggccgaagttggtctctgcggccatcgggtcgccgatgcggatgcgcttgacgcgctcgacaacggcggcctcgaacgcggccagcatgctgcgcggcacgaacacgcgggtgccgttggtgcagacctggccggagctgaagaagttggccatcaccgcgatgtcggcggcgcggtccagatcggcgtcatcgcagatcaccagcggcgacttgccgcccagctccatggtcacttccttcagcgacgaggacgccgcgctggccatgaccttcttgccggtggcgacgccgccggtgaaggaaatcttctcgatcaccgggtgctcggtcagccactgcccgatctcgcggcccgggccctgcacgacgttgaacacgccggccggcacgccggcttcggtgtagatctcggccagccggatcgcggtcaacggggtcacttcggacggcttgaacaccatcgcattgccggcggcgagggccggggccgacttccacatggcgatctggatcgggtagttccaggcgccgatgccggccaccacgcccagcggttcgcggcgggtgtagaagaagctcgattcgcgcagcggcagctggatgccttcgatggcggtggccaggccagcgtagtactcgaccacgtcggcgccggtgacgatgtccacggtggtggtctcggccagcgccttgccggtgtccagggtttccaggtgggccagttcgtcgttgcgctcgcgcaggagctcgacggcgcggcgcaggatgcgcgagcgctccatggccgtcatcgcggcccacaccttctggccttcggccgcgctctgcacggcgcgctcgacgtcggcctggctggcaacctgcacttcggcgatcacctcaccggtggccgggttgacggtcttgaaggtcttgccgctggtggcatcgacgcgctggccgtggatgtagagctgttggacgggcagggtggtcatggggcgtactccttggaagggggcgggtgctgaagcgcttatagcgcggcagcctgcaactggaagtcgatgtagccgtaggcgatgcgccgcgacttgtcggcgttgaactggccgccgaccaggctgccacgcagccacaggccgtcgatcatcgcggccaggccacgggcggccaggcgggcctgcgggtggggcagcaggcggttgaactggtggcacaggttggagaacaggcgctggtcgttggcgcgctgcagccgggccagttccggctggtgcatgctggcggcccagaacgtgagccagacgcgcattgcggtaccgttgatctggctgtcgtcgaagttgccatcgacgatggcacgcaactgctcgcgggggtcatcgctggcctcggcgcggtagcgggcgacggcgtccttcagttcgcgcaggatctgccgcattgcagcattgagcaggccgtccttgtcgccaaagtagtgggcgacgatgccgctggacagccctgccttcttcgcgatggtggcgacggtcgcgtcggccatgccgatctcgtcgatggtctggaaagtggcccggatcagctgttcgcgccgtaccggttccacgcctttcttcggcattgtctctccacggattgcgacccgaaggatcggctgcccgccattatgctttttattgattgaacgttcaatcaataaaccctaggatgcgctcgcgccccacgccatgggcccggtttaccggtccggccccgcccatgtgctcccccggactgatgagacgatcccatgtcttccctggctcatcccaagcgttcgcccctgcgcttgaaccgttttgtctttctcagctcctcggtgtcgatcggcatcctcgggctgctcaccgttctctatcccgaaggcagcgagcactggctgcaatgggcgcaggccgaggtgtcggccgcgttcggctggtggtacatgctgctgatcgtgctgtgcctgggcttcgtgctgtggctggcgttctcgccgtatggccgcatccgcctgggtcacaacgaggagtcaccggccttcggctacgttgcctgggtctcgatgctgttctcggccggcatcggcatcgcgctgctgtactacggtgcctacgagccgctggaccatttcctgcatccgcccgggcaacccggcgggaccgtggccgccggccgcgaagcgatggtgctgaccttcctgcactggggcctgcacggctgggcgctgtacgcgctggtcggcgtggcgctgggctacttcgcgtaccgccgcgacctgccgctggcgctgcgctcggcgctgtacccgatcttcggtgagcgcatccacggccgcatcggcgacatggtcgatggtttcggcatcctggccacgctgatctcgatggtgaccaacctcggcatcggcgcgctggtggtgcagtccggcctggtctacctgttccacatcccggatacgccgcaggtgctggtggccatcgtgctggtgatgatggtggtggccaccatcggcgtggtcgccggtgtggaaaagggcattgcctggctgtccaacctcaacgtgcgcctgctgtgtggcctgctgctgttcgtgctggtcaccggcccgaccctgcacctgttcgacggcctgatccagaacaccggcgattaccttggcgcgttcgtgcgcaagagcttcgacatgtacctcaacgacccgaagggccgtgagtggatggggtcgtggacgctgttctactgggcctggtggatcgcctgggcgccgttcgtcggccttttcgtggcgcgcatctcgcgcggccgcaccatccgcgaagtgatcatgggcgtgctgctgatcccgctcggcttcaccctggcctggctgtcgatcttcggcaacaccgccatcgacctggtgctcaaccacggccaggcgatcctgggtgaggtggcccagcacgatgcggcgatgacgctgttcaagctgctggaatacctgcccggcgcgccgtacgtggccggtgccgcagtggtgatcggcttcgtgctgttcctgaccccggtcgactcgggcacgctgatgatcgccaacctgtgcacccgtcgcgttgacgatggtgtggaagacggccatgacgcgccgatctggctgcgcgtgttctgggcggccggcattaccgtggccagcgtcggcctgctgctggcgggcaatttcagtgcgatgcagacggcggtggtgctgtgtggcctgccgttctcgttcaccctggcgttctacatgtggggcctgctgaaggcgctgcgcaccgacccggacgcaccccgccgctgagcgcctctgtagagccgagcgcaggctcggctgctgttggcgcagaagcagccgagcgcaggctcggctctacaggggggcatcgcagacggaaagggccggacccgcaaggatccggcccttttccgttacttggctgccagctggcgcagcacgtactgcagcaggccgccatgacggaagtactcgacttccttcggggtcagcagcatcaccgagacctcgaaggtcttcttcgtgccatcggccttggtcgcggtgaccgtggcgcgcttgctggcaccgtcctgcaggccggtgatgtcgatcacttccgagccgtccaggcccaggctctgcgcgttctcgccgttgcggaactgcagcggcagcacgcccatgccgaccaggttggagcggtggatgcgctcgaagctttcggcgatgaccgccttcacccccagcagcagggtgcccttggccgcccagtcgcgcgacgaaccggtgccgtattccttgccggccagcaccaccagcggcaccttgtcggccttgtacttcatggccgcatcgtagatcgccagcttctccggctggccaccaccggcggggtagtacagggtgttgccgccttcctcgccaccgaacatcaggttcttgatgcggatgttggcgaaggtgccgcggaccatcacgtcatcgttgccgcggcggctgccgtagctgttgaagtcggccggctgcacgccgcgttcctgcaggaagcggcccgccggcgagtccttcttgatgttgccggccggggagatgtggtcggtggtgatcgaatcgccgaacaggcccatcacgcgtgcgccgtgcacgtcgtcgatgctgccggtctgcatggtcatgccatcgaagtacggcgggttcttgatgtaggtggaggcaccgctccacgcgtacaggttgccgtccggcgaggcgatggtgttccagcgggtgtcgcccttgaacacgtcggcgtagttctgcttgaacatctccgggccgatggtggcggcgatgacatcgccgatttccttgttgctcggccagatgtcgcgcaggaacaccggctggccatcgctgccggtgcccagcggctgggtggtcaggtcgatgtcggtggtgccggcgatggcataggccaccaccagcggcgggctggccaggtagttcatcttcacttcggggtgcacgcgaccctcgaagttgcggttgcccgacagcaccgaggtgaccaccaggtcgccggtggcgatgccggcgctgacttcggtcggcagcgggccggagttgccgatgcaggtggtgcagccgtagccgaccacgtagaagccgatcttctccagctccttcagcacgccggccttttccaggtagtccgtgaccacgcgcgagcccggcccgagcgaggtcttcacccacggctggcggttcaggcccttggcggccgcattgcgggccagcaggccggcaccgatcatcaccgccgggttggaggtgttggtgcaggaggtgatggcggcgatgaccaccgcgccatccttcagccgcaccttgcggccttcgatctcgatgtcggcgaagcccttggccagctgctcgttgccgaccgccgcgccgccgccctcattgacgaacgaggaaacatcatcactgcgcttgtcgcggttgctggtcatgccaaccagtgcttcgcggtagttcttctgcacgtcctccagcagcacgcggtcctgcggacgcttcgggccggccagcgacggcttcaccgtgcccatgtccagttccagcgtggtgctgtactgggcatgcgggctgcccggttcgtgccacaggccctgtgccttggcataggcttcgaccaggtcgatctgctcttcgctgcggccggacaggcgcaggtagttcagcgattcggcgtcgatcgggaagatgccgcaggtggcgccgtactccggggccatgttgccgatggtggcacggtcggccagcggcaggtgctgcaggccgtcaccgtagaactcgacgaacttgccgacgacgcccagcttgcgcagcatctgggtgacggtcagcaccaggtccgtagcggtggcaccctcgggcagcttgccggtcagcttgaagccgaccacctgcgggatcagcatcgacgacggttggccgagcatggcggcctcggcttcgatgccgcccacgccccagccaagcacgccgatgccgttgatcatggtggtgtggctgtcggtaccgaacacggtatcggggtaggcgaccgccttgccgtccttgtcggccgtcatcactacgcgggccaggttctccaggttcacctggtggacgatgccggtgttcggcggcaccaccttgaagttgtcgaaggccttctggccccagcgcaggaagccgtagcgttcctggttgcgctggaattcgatcttgccgttgaggtccagcgcgtccggcttgccgaacacatcgacctgcaccgagtggtcgatgaccagttcggaggggatctgcgggttgatctgctccggcgagccgcccagcttgacgaccgcgtcgcgcatcgcggccaggtcgaccacgcagggcacgccggtgaagtcctgcaggaccacgcgcgccggcatgaaggcgatctcggtgtccggctcggccgccgggttccagcgggccacggcttcgatgtggtccttgccgacggtgataccgccgtcctcgtgccggagcaggttctccagcaggatcttcatcgagtagggcaggtgggagatatcgaagcgctggcccagcgtgggcaggctgaagtagtcgtaggtcttgccgccgacgttcagctggctgcgggtggagaacgaatcgctcatgcggggtaactccttcttgcggatggcttgcagtggcccgcgcatgggcgggcctgcttgcggtcgccgcgggcctgacggccccggtcgtcccagtatgaacctcagactgaatggattcatccgggccgggttccggcctgcggcatcggttccagactacaggggaaggtgtatggcgtatgtcacgtttgtggccgatcctttgcgaggtaagggctggcggggcgccggtgctgttcagggtggaagtatgcccggggaagtatgtataatttgtgcatactctggagggcctaccgatggaagccactgttgcagaacgcggacagatcaccctgcccaaggcggtgcgtgatgccctcggcctgaccaagggcacgctgctgaaggtcgagctggacggcagccgcatcatcctgcgcaagagtgttgacgatgcgatttcacgggcgcgcggcaagtttgcgctggacggcttcgaatcgtccgacgcagcggtacgtgcggtgcgtgacgaggaataagccgtgatgatcgccgtcgattcaccggtgctggtcgagctgctcagcaatggtccgcaggccgatgccgtggaagccatcctccggcagagcctggtcggtggccgcgtggtggtctgtggcgcgaccctggccgaggtctgcgcatcgctgcgcggcggcgccgaggtgctcgaagcgctggaagaaatgggcgtgcacttcaacccgatggaagccaagtcggcgctgcgcgccggcgagatgcaccgccgtcatcgccagcgcggcggcagccgccgcagcctggacgaattcatggtcggcgcccacgcactgctgcagtgtgacggcctgatcacctggaacgacacgttttaccgcgactacttcaagggcctgaagctgatcgtgccgcacgcctgagcccactttgttatttcaacctacgcattacccgggagttgtcatgttggaagcctaccgccaccacgtcgccgagcgcgctgcgcttggcatcccgccgctgccgctgagcgcgcagcagacggccgatgtcatcgaactgctgaagaacccgccgcagggcgaggccgagttcctgctcgacctgctgacccatcgcgtgccggccggtgtcgatgacgcggccaaggtcaaggcctcgtacctggcggcgatcgccctgggcagcgagcagaacccgctgatcagccgcgagcgcgccaccgaactgctgggcaccatgctcggcggttacaacgtggccccgctggtgcagttgctggacgacgccagcgtcggcaccatcgccgccaacggcctgaagaagaccctgctggtgttcgatgcgttccatgacgtgcaggaaaaggccaaggccggcaacgccaacgcccaggccgtgctgcagagctgggccgatgccgagtggttcaccagcaatccggaagtgccgcagagcctgaccgtcaccgtgttcaaggtgccgggcgagaccaacaccgacgacctgtcgccggcaccggacgcgaccacccgcccggacattccgatgcacgccctggcgatgctgaagaacaagcgcgacgacgcgccgttcaccccggaagaagacggcaagcgcggcccgatccagcagatccttgacctgaaggacaagggccatctggtcgcctacgtcggcgacgtggtcggcaccggttcctcgcgcaagtcggccaccaacagcgtgctgtggtggaccggcgacgacattccgttcatcccgaacaagcgcgccggtggcgtctgcctgggttcgaagatcgccccgatcttctacaacaccatggaagatgccggcgcgctgccgatcgagctggacgtgtcgaagatggaacacggcgatgtggtcgagctgcgtccgtatgaaggcaaggcgctgaagaacggtgaagtgatcgccgagttccaggtcaagtccgacgtgctgttcgacgaagtgcgtgccggtggccgcattccgctgatcatcggccgtggcctgaccggcaaggcgcgcgaagcgctgggcctggccccgaccgatctgttccgcctgccggtgcagccggtcgacaccggcaagggcttctcgctggcgcagaagatggtcggccgcgcctgtggcctgccggaaggccagggcatgcgcccgggcacctactgcgaaccgaagatgacctcggtgggctcgcaggacaccaccggcccgatgacccgcgacgagctgaaggacctggcgtgcctgggcttctcggccgacctggtgatgcagtcgttctgccataccgccgcgtacccgaagccggtggacgtgaagacccaccacaccctgccggagttcatctccacccgtggcggcgtctcgctgcgcccgggcgacggcgtgatccacagctggctcaaccgcatgctgctgccggacaccgtcggcaccggtggtgactcgcacacccgtttcccggtgggtatttcgttcccggccggttcgggcctggtcgccttcgccgcggccaccggcgtgatgccgctggacatgccggagtcggtgctggtgcgcttcaagggcaagatgcagccgggcgtgaccctgcgtgacctggtcaacgcgatcccgctgtacgcgatcaagtcgggcctgctgaccgtggccaaggctggcaagaagaacatcttctccggtcgcatcctggaaatcgaaggcctgccggagctgaaggtcgagcaggcgttcgaactgtccgatgcctcggccgagcgttcggcggccggttgctcggtgcgcctgaacaaggaaccgatcatcgagtacctgaccagcaacatcaccctgctgaagtggatgattgccgagggttaccaggacccgcgttcgctgcagcgtcgcatcgagaagatggaagcgtggctggccaacccgcagctgctggagccggatgccgacgccgaatacgccgccgtcatcgagatcgacctggccgacatccatgagccgatcgtggcctgcccgaacgacccggacgacgtgaagaccctgtccgaagtggccggcgccaagatcgacgaagtgttcatcggttcgtgcatgaccaacatcggtcacttccgcgccgctgcgaagctgctggaaggcaagcgtgacctgccgacccgcctgtgggtggccccgccgaccaagatggatgcttcggagctgaccaaggaaggcgtgtacggcaccttcggcgctaccggcgcgcgcatggaaatgccgggctgctcgctgtgcatgggcaaccaggcgcagatccgcgaaggctccaccgcgatgtcgacctcgacccgcaacttcccgaaccgcctgggccgcaacaccaacgtgtacctgggttcggcggaactggcggcgatctgctcgcgcctgggccgcatcccgaccaaggaggagtacatggcggacatcggcgtgatcaacgccaatggcgcggagatctaccgctacatgaacttcgaccagatcgaggaataccaggacgtggccaagacggtcgctgcctgatgcggtaactgaaaacccccggctcgcgccgggggtttttttgtgagcggacgacgcatggtagtgccggccgctggccggcaacccgttgaaacgaagaacctccggtgaaagccgggtttctattgtgcccggccaggtggcctagcccatgcgcatcgcggttcgggtctgctcctggacgtggtcttgctgaccgacctgctgtgcctgcgcaatctgttcggccttggcgatcgactgctccaccggcgtattgattgcctcgctgatcggaaccgacgcccgcaggtgtgccggattgcccggtgctccctgcacaacgaacaggcgagggcccgagccatcgctgggtggactgcccaggaccacatgatcaacgcgttcgaggccgctgctcttggccgtcgcaagcaggctggccgtcatgcgctcactggtttcatcgaagctgcgcccgtgcctggcatccacggcggatacaccatcgcggatctgctggtagagcacatggtctggatggccttccttcctgggatccaagcctgccttgtccaaggttgactcaatgctctcctgcaatggactcctgggagagaagccgggattgccgagagagggcgagcccttgtcggttgcatcctggatcagctgctcccccggcctgagcgcattccgggcccgctgctccgcttcagcctcgcggcgggcatatgcaccggcttccccggtaccgcgcaggtaattgatcccgtcgcgcagcaggccaggtccgccgccgaccagcacggtcgcgcctgcgcgcaactgatgaacatcactgcggtagtcgacaatccggcgcaggtcttcaggatccgtgatccgggcctggggattgtctagtacagactgcaccgggcacttgtcggtcacgcgatcaaggaaatgaaccaatcgatgggagtcgcccaactggaccgccaccgcggcggacatgacatggccgcttttcatcccaggtgttccaagcgaggcgatgcgctggccgtgctcggcgttgcgcaggacctccagttccctgggcagcgcatacatctcgaccttgccgtaatgaggaccgcccgcgctgaccaggtcgcctgccatcacatggttggtgaagggcgccgcgttggccggctggccctcaggaaggcgatacgccagcccggcagcaccgtaaggattgaatgcgtcgccggggaggttgtagtggtgtgcagtgatctgggcgagcgcgccgcccagcgagtggccggtgacgtacaccggaccatacccattctctttagccagatcgatcgcctgcttggtcagtgcgagggcatcaccgagttgtgcgttgactcttgacgccttggtagccggtggcggagtttaggctggccaatacacgatattccgtcccggcaatggtaacaatggccttgggcgcagggagcggatccttgtagacatgatctgagagggctgcatttgctccaggattcattgggctgttccttcagtccgtgtggagatttcgattgggaagtaatcctttcgcttatcttgaggcatcttctcgtaccaagtcgaaggctcggtaggcgtccactctggcgatccccctgaagtcatggggcgcaaggcgcgatgtacgtaggtagtagcgagtttctcggtttcaagctttgtgaatgaagtccatgcggttgcttggatagggcgatcatcgatgatgaaggcgaatgaagcttccacgagcacgggcgtccaagtgcacgggccgcgaccgtaatagtcggcaacttccatgccatcgttgaatacaacactgctgaattcagtggcactgaggcgctgtgcctgaagctcaaccttgtgctggttcggctcgtactgcaccccctcccaattgttgaccggagggagacagagtgggtctatctcatacgtgacaaagaccgaaggaacggggacatccacgggtgcatcgtggacccgaatcacaataggcagcgcatccctgggtgcaggattctcgcgatagaccgggtatgagcgttccttgttgcagcccggaacggccagtgtgatcgaggcgatcaacgcaacgtgagcaagggtcgggagaactttcagcatgagcggtccatgtcgctgcaggattttccttgatccctggaacatgcggtctcatcacgaacgacggcgccgcatccgggcaagtgcgacaggttgcgcagtgggtattgcccgctatccggacctccctccctgcgtacccgagcagcgcggccttgcggggtaacgttcatcggcgttccattgctgtgcgatacctgactatacgacccgctccagccgcgctccaagtcggtgtcctgcgggcctcccgtttggcgcgcatggcttgcggcaggatcaaacctcgatcagcgtcgttgaaacatcaatggtcgaaagtgctggcggcggatcggcaatggagcctgacgtctcttggaggtgtccagcagggtgcagagccgagcgtgggctcggctctacaggggcctgtcagccgcgggcgagggcgagcagccgctcggcgatccgctccagtggcacctgttcctcggccgcgcccagcttgaacgcggcacccggcatgccccagaccacgctggtggcttcgtcctgcaccaacgtcggcgcgccggcctggcgcatttccagcaggccgcgtgcgccgtcgtcgcccatgccggtgaggatggcgccgatggcgttgccaccggcgttctgcgcgaccgaacggaacagcacgtccactgccggcttgtggcggttcactgccgggccatcgtcgacgcggcagcgccagcgcgcaccgtcgcggatgatccgcaggtgcttgccgcccggcggcaggtaggcatggccgggaagcaccgcttcgccgtcgctggcctcacgtaccgccatcgccgagtggcggtccaggcgttcggcgaaggcactgctgaagctggccggcaaatgctgggtcatcaccacggcgggcgcgtcggcaggcatgccttccagcaccacgcgcagcgcttcggtgccgcccgccgaggaaccgatcgcgatcagccggtcggtggtgcggaactgcggcgcggccgggcgtatcgcgggcgcggcgtccagcatgagcttcggcgcggcagcgcgcaccagcggacgtacccgcgagcgcgccgccatcttgaccttggcgatgatctcgtctgcgtagccctgcaggccgcgggccacgtccaacttcggcttggacacgaaatccacggcgcccagcgccagtgcctgcagggtggtgtcggcgccgcgctcggtgagcgaggagatcatcaccaccggcaacgggtgcaggcgcatcaggttttccaggaacgccagcccgtccatgcgcggcatttccacgtccagggtgatcacgtccggggccagtcgcttgatcttttcacgggccagcagcgggtcggcggcggtgccgaccacgtcgatggcaggatcgctggacaggatctcggtgagcatctggcgcacgacggcagagtcgtcgacgatcagcacccggcagggggcgttgccggtaaaggtcattcgaacagctccacgccaccggtgaccggcgccttggacaggcgcgcacgcaccgccgattcggtggcagccacttcggcctcatgcgcatgcggcaggcgctgcaccaccacgcggccggtgtcggcgaagaaccagatcttgcgcggatggatgccgcacaggtcctcggcgatgatcgggatgtgctcggcctgcaggtactggcgcacgaactcggcgttgcgggtgcccactggattgctggtgaagcccttgagcacgttggcgccgccgaacaccttggcctcgatgcgcttgcggtgggcgccccgcttgagcatgtcgttgatcagcagttccatcgcatagctgccgtagcgtgcgggtgcgccgtcaccggcgttgccctccggcagcaggaagtggttcatgccgccgatcttcagcaccgggtcgcgcaggcaggccgccacgcaggagcccagcgtggtggtcagcgcagtggtgtcatcgaccaccaggtactgggtcggcagcagcttggcggcgatggtctggaagcgcgcatcctggtagcgcatcacatcgtcggtacgcagcgaggcattcatgcgccggcctttgcggcacggcggtacagggtgcggccgcagggctggatcaggtcggcggcgtgcaggtagttctccgagtggccggtgtagagcaggccgtcatcggccaggtgctggaccaggcgaccgaggatggcgcgctgggtcggcttgtcgaagtagatcatcacgttgcggcagaacagcgcgtcgaacgggccgccgacgtcgtagcgcggggcgagcaggttcaatgggcggaactcgatcagttcgcgcagcgccggcagcacgcggcactggccctcgttggggccgctgccgcgctggaagtagcggcggcgcaggtccggatcgaggctggcgacgcgatcgatgttgtagacgccgcggccggcggtggccagcacctgggtatcgacgtcggtggcaatgatgcgtaccggcggcttcaacgtgccgaaggcctcgcaggcggtgatcgccatcgagtagggctcttcgccggtggacgccgcgcacgaccacagcagcagtggggcgcggctggagcgccgttggagttcctcgcgcagcttgtcgaagtgatgcggttcgcggaagaacgaggtcaggttggtggtcagcgcgttggtgaacgcctgccattcgtcaccatcttcctgctccagatggtccaggtactgctggaagctgcgcatgcccagcgtgcgcaggcggcgcgacaggcggccatagaccatgtcgcgctttgccggcgcgagggcgatgcccacccgctggtagatcaggtcgcagacgcggcggaaatcgcggtcggcgaactcgaattcgcgcgggccggtgacgatgggggtaggactttgcacgggggacgtgtccatcggcagaggcggcggccgcagccgccgcgggtgggtctcagaattcctgccagtcgctgtcgctggcggcgaaggtgctggcgttgctgctgcggcggaccggagcgggcgtgctggtcggctgcgggcgtgccacggtggtgatacgggccggctccgcgcgcgcggccacggccttcactgcggcggacacctggttgtcgaggcggaagatcgccacggcgtcagccagctggccggcctggtcctccattgcgcgtgccgcagcagtggcttcttccaccaacgcagcattctgctgggtggtttcgtccatctgcaccacggtctggttgacctgctcgatgcccgccgactgttcctgcgaggccgcagagatttcggccatgatgtcagtcacgcgctgcaccgaggcgacgatctcgcccatggtcgcgccggccttgtgcaccagcgccgagccgtcgttgaccttgccgaccgagtcgtcgatcaggcccttgatctccttggcggcggcggccgagcgctgggcgagggtgcgcacttcgctggcgaccacggcgaagccgcggccctgttcgccggcacgggcggcttccactgcggcgttcagcgccaggatgttggtctggaaggcaattccgtcgatgaccgagatgatctcggcgatcttcttcgacgaggcttcgatggccgacatggtggtgaccacctggccgaccacttcacccccctgcgaggcgacaccgtgcgcgccgatggcgagctggttggcctggcgtgcgtgctcggcgttctggcgcacggtggaggtcagttcctccatcgaggcggcggtttcttccaggttggcagcctgctgctcggtgcggcgcgacaggtcgctgttgccggaggcgatctcgccggcggccagggtgatgctggacgcgctggcctggatctggccgacgatctgggtcagctgtgcaacggtggtgttggcatcgtcgcgcatgcgtgcgaacacgccctggtaatcgccgtgcatgcgtgcggtcaggtcaccttcggcgatggccgacagcagctgcgagagcttgccgaggttgtcatcgctgaccgccatcatcgcgttgaggttctccagcatcaggcggaaatcgtgatcgaagcgctgcgcatcgccacggaggctgaagtcgccggcggcggcggcgctggcaagctgcttgatctcggcattgatgcggccgaggttggccttgaccgtatcaacggtggttgtcatcgcggccttttcgcccgggtagcgtgcaatgtcgcggctgagatcgccaaccgcgtactgctgcaccacgtccagcacgtcgtgcagggtctgcaggtggccgccgaccagggcgttggtttcctgcaccatcagcccgtactcgccggggaaggcgctggcgtcgatgcggtagctcagttcgccgccgtcatgacggcgcgccatttcgcgctggccggtgatgactgcatgcagctgctgctgcatgccggccatggcctccagcaggcggccggtttcgtcgtgcggctgcgggccgatgtggctgtccagcttgccgccggcgatgccttcggccacggcggtggcctgcttcagcggcacggcgatgcggttgccgatgacccagctcagggccagcacgatcagcaccagtacgccaccagagaccgccatgatggcggtgaacaccagcgcctgtttctgcacgtcgtccatgtagacgccgctgctgaccacccagttccagggcgcgaacaggccggcataggcgaccttctcgacctcgcccttgctgcccggcttggcccagcggtagttgacgaagccgccgccggcgcgagccgcttcgacctggtcgtagtagatccgtacgccgtcgtcggtgcggaagtccttcatgtccttgccgaccaggtccttgcggaacgggtgcatcagcaggcggtagccggtgtcgtagatgttgaagtagtaggtgtcgttcccggcgcgcatgacctccagcgcctgcagcgcggcgctcttggcggcctcttcgctgagctcgccggtaccggccaggcggtggtagtgctgcaggatgccgtagctcagttcgacctgggtcttcagcgcgctcttgcgggtttcggtcaggtccaggtactgcatgcgggcggcgatcaccgagagcgcgatcacgccgagcgcgatgagcagcgtcagcaggttgagcttgcgccggacggaaagattgcggaagtagtgttgccagcgatgcaggagattcatcgagcaggaccaggtcgaagcgggcgggcggcgccgtgccggtcagcggcgggatacgccgtgacaaccccgttatcggccgcgcgggcgggggattgaggtgcggtgtccgaacgtattcaggtttccttgcagcggcggctgcggcgctgcctgcggcaggcttttgaagcaacggcaacggcaacggcaacggcagttggtcggctctgaattttcagtgggtggctgggtcggggtgggctggcgggacacgccgtaaacccgtccgtgggggctcgatggcgccatccatggcgccaacggtcccgccagcccaccccgacccagccctcccggcatttcggtgtcggacggcaagagcgttgagtttccaggtggaaagaggggtcagatccgttttcctgcggaaaacggatctgaccccggaagtgacctggcttttgtcttttgctcttctttcttcaatccggggtggacgcgcacgggaagtgtccgtggccgggagggtgggttgcgcaggggcgtgagccgcatggggtcgaggcatgcctcgggcgggttgggcaggatgcccaaccccggtcttgccgtgtgcgcaggacagtgcacacgtgcaagcggcgaccgagcttacagagacgtacttgcagcgtcccctgcgcaacccatcctcccggcccaaacgaaggaagtccgccgctctcagcgaccaccccgaggggcttcgccgttggctggataatcagataccccctaaacaaaaacgccccagcacagggccagggcgttcttgtaactcaggtcaggcaggcatcagaactcctgccagtccccgtcggccagttcggtggccatcgggcgaccacccgccgtgcggcgggccggcggggcagccggggccggggcggccggtgcagcggcgcgcggtgccggggtggtgacgcgcggggcggcgacgacctcggcttcgtccaccacgaagatcgacacggcctcgctgaggtggccggcctgttcttccatcgcacgtgcggcggcggtggcttcttccaccagcgcagcattctgctgggtggtttcgtccatctgcaccacggtctggttgacctgctcgatgccggcgctctgttcctgcgaggcggcggagatctcggccatgatgtcggtcacgcgctgcaccgaggcgacgatctcgcccatggtcgcgccggccttgtgcaccagcgccgagccgtcgttgaccttgccgaccgagtcgtcgatcaggcccttgatctccttggcggccgcggccgagcgctgcgcgagggtgcgcacttcgctggcgaccacggcaaagccgcggccctgttcgccggcacgggcggcttccactgcggcgttcagcgccaggatgttggtctggaaggcaatgccgtcgatgaccgagatgatctcggcgatcttcttcgacgaggcttcgatggccgacatggtggtgaccacctggccgaccacgtcaccgccctgcgaggcgacaccgtgcgcgccgatggcgagctggttggcctggcgtgcgtgctcggcgttctggcgcacggtggaggtcagttcctccatcgaggcggcggtttcttccaggttggcggcctgctgttcggtgcggcgcgacaggtcgctgttgccggaggcgatttcaccggcagcggagctgatcgcgcggctggactgcttgatgcgggtgacgatctcgctcagctgcgcggcggtggcgttggcgtcgtcgcgcatgcgtgcgaacacgccctggtaatcgccgtgcatgcgcacggtcaggtcgccctgcgacagcgcggccagcaggccggagatctgctcgatgctgccggcattggcgtccagcaggccgttgatctgctgggccagctgcaggaagaagccttccttgtcgctggcatcgatgcggccggacaggtcgccagcggcggcctgggcgatcacgcgggccacttcggcttcgacctgcgcttcctgggtacggtcgcgccattccaccacgtagccgacggtgtcgccgccttcattgcggatggtcgagaccacctgggcgaactgggcatcgccgtactgcatcgggcgacgggcgacgccgtgtgccttcaggttgcccagcagggtctggtccatctcgccgcggtgttcgagcacggtgaccggcttgccgatcagcgaagcctgcgcatcgaagtccggcaggtcgcggcgcagttcgtcctggtactggctcagggtctgctgcagggcgcggttgctgtagacgatggtgttgctggtgtcggtcaggtagacgccggtcgagctgtagtccagcgcggtacggatgcgcaggttctcgcgggcgatggcctggtcggtctcgatgcgctcgcgcaggtcgcgctgcatgcgctgcatggcctgcatcagttcgcccacttcatcctggcggctgacgtcgatgtggccatcgagcttgccgccggccacgtcgttggccaccgagacggcgccacgcacgctgccgaccagggcgcgggcaaacagccacaccagcaccaggccgagcgcggcgccgcccagcagggcgatcacggtcagcacggccgaggcggagtaggtggatgcggcctcttcgcgcgaggcgcgggcgaggcggttgtcttcggcgatcagcgcttccagcgcggaggcggccttgcggtgcttggtgcgggtttcgccgacgaaggtatcgatggcgtcgtccggcaggtccagttccagcatctcggtgacgctgtcataggatgccagggcgtccttccattccttggcgaaggcgtcgaacagcttcttctgctgcgggttgtcgaccagcttcggatactccttgatcgacttgtccatgctggcgcgcaggtcgacaccctgcttgcgcgcatcggacttgacgtcatcgctggcgcggatcagctgctggtaggcggcattgcggtactcgcccagcatgccgcgcatctcgccggccatgcggatgctctccatgcgtgaaccggccagctcggtggtcacgttgttcagcgaatgcaggccgcgataggcgacgatgccctgcagtagcatcaccagcaggaggacgccgaaggtcagcagcagtttcggcatcagtttcaggttgttgatccacggcatgggcgttgcgagctcctaaggcagacgcgcccgggcatcgggcccggttgcagcagaaaccacgccaggaccaggcccggcgtggtccgacgaacggcggattacttgatgttggccagcttcagcccggccggcgagctgacttcgatttccgcacgcgaggcgtcgcgctggatcttgccgatcacgcacacggtcttgccttccagggtttccagcgggaaggagaacttgccgcggttctcgccggcgatacgcgccgagaaggtgtggcgcgggaaggcgccgcccatgtacaggaaggtcggctggccttcggagccttctgcgtaacgggccttttcgaccttgccacagaccatgccgtccttgccgaccgaacgcggcgccatttccggcgggatcatgtcggccgactgggcgaaagcggaggcggcggtggtggccaggacagcggccgagacgaacgcaaacagggacttcatcgagggtatctccggggatggtaacgatcgggccggtcctgcgcgctcctgcgcgaccggcttctgtccccctatcggcaccgccgaagggaactgaagggttttgtgactggaacgtgaagcagttccgtttgctcaggcagcgacgtcttcggcgaggttggcctggcccatgtcggcgctgtcgagcagggtctcgatgtccagcaggatcagcatgcgatcgtcgtgggtaccgatgccggagatgaaacgggtgtcgacggccgcgccgaattccggggtcgggcggatctgctcggccgacagcgggatcacgtcggagacgctgtcgacgacgatgccgaccacgcggtcttccacgttcagcacgatcatcacggtgaaggcatcgtagcgggcgttgtccaggcgcagcttcaggcgcaggtcgatgaccgggacgatggtgccgcgcaggttgattacgcccttgatgtagtccggggcgtccggcacgcgggtgacggcgtcgtagccgcggatttcctgcaccttgaggatgtccacgccgtagtgctcgtcaccaagggtgaagctgaggaattcgccaccggcgctggcggcggagctggtcttgtcgttcatcgaggggtcctggttctgccggaagtcccggtgtcaggctcgatatcggccccgccgggggggactttaggtgccgggcagtgccgtggatggggtcagatcccttttcagggaaaagggatctgaccccggcacgcgttccagggttgccggccggcggccggcactaccggtcggacggcctcagagctcgccgttgcggcgggccttgcgctggcggtcgatgcggaagatgtagcgctggatggcgctgtcggcgccgcgtggcagacattcaaagcgcatccccacgcgcttgacctcgatgccattgggctgacgctgcggcagcaggttgcagaccaccagttcgatatccaggtcggggccgtccggcagcgacagccgcgccggatagcgcctctgcagaccaaacaccgcgcagtcattgggcaccaccacggccaggccgccaccgctgatgtccactacgcgcatcgacagggcttcggcgcgcgcttcgccaggcggcagcagcaggtggggcgagtcggtgaccggcgtctccagccggtacagctcgcggcgctgcaggtgcaccagttcgtcaggcagcggcgcacggaaggccacatggccgtcgttgtccacgcgctgcagttcgtgcagccggaaccgtaccagcacgcgttcgagctgggcgaagcacagcaggtgatcggcctgctcggcggcgcggttggaggcttcctgcgggctgccatcgagcagcaggaagtcctcgtcctcgtcgaggtcgagcagggcggtcgggaaggaacggtcgcggccgtcgatatgggcgttgatcagcgatcgctggtcgatcagcgagcgcagcagctggcgcagctggcgcgggttgcggaccaggaatcgttcgtccgcggcatcggccgcgtggacatcatgcactgcagtgtcgttgccgtcggacatggaatctacggtcaggggcgggcgccagcacgcattggcgcgaggctcgatggggatatcggctcctgcaccggattatgaagtgggatttgcatcactttccacgtgtaaggggtcagatccctttcccacaggaaagggatctgaccccgtgcttctgtcagaattcctgccagtcgccgtccgtggccagcgccggctgggccgttgccgtgcgcagcgcacgtgccggggccggctttgccgcaggcgcggcggctgcgacctgtcgcggtaccggtgcggccagcgggcgtgccggaatggccatcgtgccctgcgatgccagccggaagcgggccacggcttcacccagctgcacggcctggtcttccatcgcgcgcgccgcagcagtggcttcttccaccagcgcagcattctgctgggtggtttcgtccatctgcaccacggtctggttgacctgctcgatgcccgccgactgttcctgcgaggccgcggagatctcggccatgatgtcggtcacgcgctgcaccgaggcgacgatctcgcccatggtgctgccggcctggtggaccaggctggagccttcggcaaccttgccgaccgagtcgtcgatcaggcccttgatctccttggcggcggcggccgagcgctgggcgagggtgcgcacttcgctggcgaccacggcgaagccgcggccctgttcgccggcacgcgcggcttccactgcggcgttcagcgccaggatgttggtctggaaggcaatgccgtcgatcaccgagatgatctcggcgatcttcttcgacgaggcttcgatggccgacatggtggtgaccacctggccgaccacgtcaccgccctgcgaggcgacaccgtgcgcgccgatggcgagctggttggcctggcgtgcgtgctcggcgttctggcgcacggtggaggtcagttcctccatcgaggcggcggtttcttccaggttggcggcctgctgctcggtgcggcgcgacaggtcgctgttgccggaggcgatctcgccggcggccagggtgatgctggaggcgctggcctggatctggccgacgatctgggtcagctgtgcaacggtggtgttggcatcatcccgcatgcgcgcgaacacgccattgaactggccttccatgcgcgcggtcaggtcgccggcggcgatcgactgcagcagctgcgagagctggccgaggttgccgtcggccacctgcatcatggtgttgagatgctcgatcatcagcttgaagtcatgctggaaacgctgtgcgtcgccgcgctggctgaagtcaccggcagcggccgccgcggccagctgctggatctgcgaattgatcgccagcaggctggccttggccgcgtccatcgattcgtgcaggatcgcgcggctgccgggcaggcggcgtgcatccggggtgagattgccgatggcgtactggttgagcacgtcgatggcatcgcggatcgcatccaggtgctcgaagatcaccgtattgatgccgccggccagctggccatagacacccgggaaatcttccggaatgcgatgactgatgtccggtcccgcgtgcatctgtgccatcagctgggtctgctcgctgaagcggcggagcattgcggtcatctcggtcgtggcggccagcatcctgccggcttcgtccttgctggtggcctgggtgctgacgctgaggtcgccgcgggcaaccgcctggatggcatgcacggccttgcccagcgggccagtaacggcgcgcgagatgacgatggccagcgcggcggccaccagcgacagcagcacgatgcagccgatgatggcgatcatgctggtgcgatgggtggcgttggcgtcggcgatcttgccgtccatctgcccggcgatgtgggtgcccagtgccttcatcgcagcgaacaggtcgcggcgcgccgggcgtgactgctcatcggagatctgctgggcctgcgcgccatcaccggcggccacggcttcgcgcatcgccttgttggcggcgaagtagcgatccagctgggtgctggcggcgcgatacagctcgcgctccttgtccagcgccggcagcgccgcatacgccgccagctcgtcatgtacggccttggcggtgtcgtccatgcgcttgttgtagtcggcgaccttctccggctggtcgagcatgctcagctgggccagttcgtaggtgcggaactcaccgagctgcgagcgcgcctcgcccaggtgctggaccgaggggatatcgttgccggccatctcgcgcagctgcgcgttggcttcgctcagtcgcagcagggcgaacgcgccgaggaccagggtcatcagggtggtaagggtgaaccccacggccagcttgcgggcgatgggcagatcttggaaccacttcatgcagggtgctccaggtgggcagagtgccggcgtctgtgcgccggtttgggggtggttgcagagcgaacggtggtgcccggtggggttcggtgacggccgtcaaagcgaaatagcggcgcagtccggatggactttatggacgcatgtcacattcggtggcgtagggatgacggcgcggaagtggcgcagcggcggggctttcgcttgcatggcgtagttgcgcgcgaaaccatcgcgtcgacggagttcacagaacggatggggtcagatcccttttccccgaaagggcatccggccccggccggaatggagcgcgcaaacaaaaaccgccgccccggagggcggcggtccagtacacgcatgcagtgtggatcaggcggcctgcggcatccgcagtgaacgcaccagcccgccgatgtcgacgatcaatgcgacgcggccgtcgccgagaatggtcgcaccggacaccccgccgatgcggcggtagttgttctcgatgttcttcaccaccacctgctgctggccgaccagttcgtccacttccagggcgatcttctggccatcgccttcgaccaccaccaccagcgattcgctgccgggtgcacggttgccgtagccgtagtactcgctcagcgacaggatcggcaggtattcaccgcgcacgcgcagcacgcggccttcgccggccatgctgcggatgtcctcggcttgcggctgcaacgcctcaagcacataggccaacggcaggatcagggtctcaccggctaccgccacggtcatgccatcgaggatggccagggtgagcggcaggcggatcagcgtgcgggtgccagcgccgaggctgctttcaatctgcacctcgccccccaacgcctggatgttgcggcggaccacgtccatgccgacgccacgaccggacaggtcagtgaccgcatcggccgtggagaagccgggctggaagatcaggtcccagacctgcgaatcggtcgggttgtccggcaccgccaggccgcgctcggtggccttggccaggatcttggcgcggtccaggccgcgaccgtcgtcgctgacttcgatgacaatgtggccgccctggtgcgaggccgccagggtgatcgtgccggtttcgtccttgcctgcaccgcggcgcacgtcgggcatttccaggccgtggtcgatcgagttgcgcaccagatgcaccagcggatcggcgatcttctcgatcaggcccttgtccagctcggtaccttcgccgacggtgcgcagccgcacctgcttgccgaggcggctggacaggtcgcggaccaggcgcgggaagcgacggaacaccgcatcgaccggcagcatgcgcacgccgatcaccgcttcctgcaggtcgcgggtgttgcgttcaagctggtccaggccagcgaacaggctctcggcgtggaccgggtccagcgcatgcgagacctgcttgagcatggcctgggtgatgaccagttcgccgaccaggttgatcagcgcgtcgaccttgtcgacgctgacgcggatggaggtttccgcttcctggctggcgccaccgctggcggcaggcgcggcgggtgccgacggcgacgctgccgccggagcgggagcagccgcggccggcgcctgggtggccaggctcggcggtgcggccggacggatgtccagctcgcagtcgtccagtacccacgcgaaggtgtcttcgatcttgctgcgcggcaccttgccgaccagacccaggtcccacgccaggtgggcttcgagcggatcgagctgcgcgaagcccggcaggcggtccatgcgcgcggcgacctgcagcgaaccgaggtgttccagttcgcggatgatgcgcagcgggtcgttgccgctcatgaacagcgacggcgccggggtgaagccgatctgccaggcttccggcgtatcgtccaccttggctgcggcggccgccggggcgctcgctgcggcctggccggacagaaccgcttccaggcgtgccttcaccgcagcgacggcagccggatcggcagcctggccatgttcggcttcgcgcagcagggcgcgcagcacgtccaccgaagacagcatggcgtcgacggcgtggccttccagtgcccgcttgccggcgcgcagctcatcgagcagcgtttccagcacgtgggtcaggccggcgatcgcgtcgaagccgaaggtgccggcgccgcccttgatcgaatgggcagcgcggaacaccgaattgatgatctccgcgtcctgctgccccgattccagggccagcaggccagcctccatcgcgtcgaggccttcgcggctctcctcgaagaaggtggcgtggaagcgttgcaggtccatgctcatggcagtggtggtccggaagcgaagagggggagcggtgccgggcgatcagcccagcactttctgcacggtggcgaccagctgttcgggattgaacggcttgaccagccaacccgtggcgccagcggccttgccttcggacttcttgtcggcggcagattcggtggtcagcatcagcagcggggtgaacttgtagtccggcagctggcgcagttcgcggatcagcgcgatgccatccatgttcggcatgttgacgtcggtaaccaccgcattgaagcgctggcccttggcgcgaccgagcgcgaccgcgccgtcttcagcttcttcgacggcaaaaccggccgaggtgagggcgaaggacaccatctggcgcatcgacgccgaatcgtccaccaccaagatacgtgcgctcatgcagcgttctccacagatttcaggttgtcatgggttacgtccaggccgagggcctgggtgacgcccagcaggcgcgcggcgtcacggaaggttgcagtgcaaccgtggaagccggtgcccaggcctgcctcgcggcgggcctgcacgaacgcacacagcacctgcacggcggccgtgtggatgcgggcgacctggctggcatccagggtcagctcgcctgcctgctccaccaggggggcaaggcggttcttgagctcggtagtgctctcgatgccgagatccccacccagttcgacagtgctcatcgttgctccggacaaacggttccgtgatccataacggcaccccggtggggttctttagaagaatcgacgcggtgcgtcgatgcggtcgctgttgaaaaggggacggaggggattaagtcgcaagcgacctggctctgccgcagccccctcggcaacggcgaccgcgcagtggggatgtaaggtgttgatccaacggatcaactccttgcgtccccgacaggcaccgctccggcgccaagcgccgagccacttgcgacttaatcccctccgtcccctttttgggggtcagctcaacagccgtgtggcgtcgagcaggatcatcgggcgctggctgacccgggccacgccgcggaacaggtcgttggaaatctggcagatgcgtgcggtatcgggaggttcgatctgtgaatcggtgaggttggcgacatcttccactgccgacacgcgcaggccgatggtctcgccgtcttcttccagcaccacgatgcgggtctgggcctcgtcctcggcggcagccgcgcccaggtgcaggcccaggtccatcaccgggaccacctggccgcgcaggttcatgatgcccagcatggcggcagcggtgccgcgcaacggcagcagcggcaccggcagcacgacctcctggaccttcagcagttccagcgcataggcctgggtgccgcagcgcaggcgcagccagcgcgaggtgcgttcaccggcacgacggttctgcggatgcgggctgcgggccggttggtgggcctgcgcctgcagctcctgccaggtgccggggcggttgcctgcgggtgcatcgacggcgacgcgcggcggcggcgtgccggcgcgtgcggccggggccggtgcagggcgtgtcgccggggggggcaccggcgctgcgaccacggcgggcggcggcgcaggcacgtcttcgccaccagcggccgcctcgaaggcggcctgcaggccggggctgtcggtgtgggcgagacgatggctgtccgccgggtcggtctcgtagatcacttcgtccggcagatcgtcccaggtgggttccgggccggtgttcgcagcggccgcagcgggtgccggcgcggtttcgtggatgacctcgtcgggcaggtcatcccaggtcggctcgcgttcggtggacgaggcgctggccggcgcggcggcggcctcgaaggcggcctccagtgcagcctcatcctcggccggggccgcgacgacggcatccgtttcgtagaccacttcagcgggcaggtcgtcccacgtgggttcgcgttcggcatcgatcacgctgacgggcgcggacgcggcatcgaaagcggcttccagtgcggcattgtccacggcaggggcagcggcaacgctctcggtttcggtttcgtagatcacctcggccggcaggtcatcccaggtgggttcgcgttcggcggcggcttcggtggccgtggccggggcggtgctgatcggcgcggggaggggagcggcggccggggcgatcgcctcgcccagcagttcgtccaggtagtcgtcgaggatgccggtgctgttcatgcggcctgctccagggcgcgggcatcctcgccgaggatccagttcaaggcgcgccggtaggcagccaggccgcgccccgggtagtcttcgccgacgctcggcagggtcagcccggcggcgttgctgatgcgggtgtcgatcggaatcgcgtcttcccagacgcggctgccatggcggtcctgcatggtgcgcagcgactcgttgccggcgcgggtgcggcggtcgaacagggttggcaggatcgagatcggcagcggccggcggcgcgaacgctcgaccatctcgccggtgcggaccatgccatccaggccgtgcagcgccagcggctcggcctgggtcggaatgatcaggcgatcggcggcagccagtgcgttgatcatcagcaggccgagcgtcggtgcgcagtccagcaggatgtagtcgtgctggccctggtggcgcgccagcgcgttctgcagggccaggccgaggccgggttggttggcgctacggcgttcaagcgtggccagcgcggactgcgcgcagacgtagtccaggccctggatgttgctggcatggcacaggccggacaggtccgccggcggtgcgccgaacagctccagcacgccggccggcggcgggtccaccggcacgccgaaggcgcggctgagcgaagcatgcggatcgaggtcgatcagcagcacgcgatggccgagcgcggccaggccgcggccgagggcgagggtggtggtggtcttgccgactccgcccttctggttggcgactgcccagatgcgcatcggattactccttcattgcggggggaacggcggcgccgacgcggctgccagccggcaccggtggcaacgtcaccggtgcgatgggggaggtgggggcgctggccggcgttgcggcggcctgttcggtgacggtgctgccggtggcgccggtggctgcgttcaggcgctggccgagcgggtccaccgaatgcgaggtgtcggccaggatgatgaccatcacccggcggttgcggttgcggccctgtgcgctgtcgttctcttcgcgcgggcggaactggccatagccgaccatcgccagccgcgacggctgcacgccctggtcggcgaacagatgcaccacgctggcggcgcgtccggccgacagctcccagttcgaagggaaggtggcggtggcgatcggcacgttgtcggtgtggccttccacgcgcacgctgttgggcacgtcgcgcagcacctcggccaggctggccagggtctgccgtgcatgtacgtccagtgcggccgagccggtggggaacaggatgtcgctgttgatctcgacctcgatccacagttccgtgcggcgcacgctgatcatgccgcggtcgatcagcggcgccagggcggcggtgagccggtcggcaatcgtgttgagctggcgctcggcacgggcgatctgctcctggttgtgcaccgacaccggcatgcgcatctgcgaggccatcgacggcagcagcgtcgggtcgtgcgagggcgccggcgcggacggtccgatcttggtgccggacttgatcaccgacgggctgtcccagccgccaccctgcacctgcttgttgcccacctgcaccggattgatcgtgcgcggcgcgccaccgaaggcatcggtgagcgcgtcggccatgatccggtacttgccctcgttcaccgatgagatcgcgtacatgaccacgaagaaggcgagcagcagcgtcatcaggtcggcataggggatcgcccatgcttcgtggttggcgtgctcttcgtggtgcttgcggcgggccatgtcagtgcaggaagccggagaggttggtttcgatgttgcgcgggttctcgccctgggcgatcgagatcaggccttcgatgaccatttcgcggtcgcgcgtgttgtgcgagatcacgctcttgagcttggcggcgatcggcaggaacagcaggttggccgaggcgatgccgtagatcgtggcggtgaacgccgcagcgatgccgtggccgagcttgctcgggtcggccaggttcttcatcaccgcgatcaggcccagcacggcgccgatgatgccgagcgtcggtgcgtagatgcccatcgcttcgaacaccttggcgccggcctggtcctggtgttcctggctgcccagttcgatttccagcatgtgccgcatcgattcgggctcgacaccgtccaccagcagctgcaggcccttgcgcaggaacgggtcctgctgcgcttccacctgcgattccaggccgagcaggccctggcggcgggcgatgttgctccactcgacgatctgctggatcagttcgcggcgatcgctgtgcggcgggcgcacgacccagcgcacgatcttgaacgcatgcttgaacaccgccggcgaggtgtgcagcaggatcgcggcaacggtgccgacgatgacgatcacgaacgccgcaggcgaccacaacgacgccaggccggcgcccttgaggatgctgccaccgaccagcgaggccagggcgagaaagagtccaatgaggctgagtctatccatggatccggtatcggcttgtatgaatgggacttgagacaccggtacgggctactggtgcgacttcacggttttacgggttcagcaagcgggtcagtcgtgcgggctgcgcaggccatccacatccaggatcagcgccatgcgaccatcgccgatcaaggttgcaccggcgtaaccgcgcaggccgcgcagggccttcggcagtggtttgatgaccacttcctcgcgcccacggacctggtccacgaccaggccgaagcgcgcttcgccggcctgcagcaccacgatggtcagcagggtcgatgcggccggcgtcacatccagccactgccgcagatcgaccagtggcagcgtgtgcgaacggcggtcgagcacggcacggccatcgaaccagcccagcgaggtgggcggcgcgtgcagtacctccatcacgcgcgccagcggcagcgcatagacgtcctcgccggcctgcaccagcagggtcggcaggatcgccagggtcagcggcacgcggatcaggaagcggctgccgcggcccagctccgactggatctggatctgcccgctgagttcgcggatgcgcgactgcaccacgtccatgccgacgccgcgcccggaaatatccgtgacctgctgcttggtcgagaagccgggcaggaacaccaggtgcaggcactcctcgctgctcaggcgggcggcggcttccggatcgatcaggcccttctcgcgtgccttcgcgcgcagcttttccggatcgatgccggcgccatcgtcctgcacctcgatgctgacgtagtcaccttcctgctgcgccgacaaccgcacatggcccatccgcggcttgccctgcgcttcgcgcaggtcgggcatttccacgccatggtcgatggcgttgcggaccaggtgcaccagcgggtcggccagcgcttcgaccaggttgcggtcgagctcggtctcggcgccgatcagctccaggtccacttccttcttcagcgagcgggcgacgtcgcgggcgaccttggggaagcgcgagaataccttgcccaccggctgcatgcgggtgcgcatcaccgccgactgcaggcgcgcggtggcgatgtccagggtggacacggcgcggtccagctcctcgtcgcgcaggcgcgcacgcagggtcttgagccggttgcgcgacagcaccagttcgccgatcaggttgacgatcgcatccaggcgcttggtgtccacgcgcacggtgtgttcggcttcggccagcggcttggcggccggcttggccaccggtgccggtgcggtggccgggcgcggggcggcgatcggtgccggcgccaccgcagccgcgggcctggcgccgggtgcggcgccaccgtgcagctggtcgagcagggcttcgaactcatcttcgctgatcaggccgtcgtcggccttctttgccggcgccaccgcagtcggtgcgttgccaccgtgcagctggtcgagcagcgcctcgaactcgtcgtcggtgatcaggtcgccggcaccggccgccggtgcggcggcagcggcggcaggcgctgctgcaccgccatgcacgtcgaactgggcgatcaggtccggcggtgcatagcccggctcggtgccggaagacacggcatcgagcatcgactgcaggtagtccagcgattgctgggcggcgtcgaagtgatgggcctgcagcacggcctggccggcacgtgcagcgcccagcgcctcttcagcggcgtggcacagctcgaccatggcggtgacaccgaggaaacccgcgccgcccttgagcgtgtggtagccccggaacaccgcgttgagctgttcggtgtcctgcggtgcctgctccagcgacaccagctgttcgccgaggcgatccaggatttcctgtgcctcgatgatgaaatcggcagtgatgtcgtcggataccgcgctcatgcttacagccccagatccgacaacaggtcgtcggcgtcgttctgcgagaccgcgtggcggtccagtcccttcagtgccggcccggccagttccgggtcggtgcgatgctgttccggcggcaggccgagcgcgccgaagccttcatgcacgcggcggacgatgccgaccacgcgacggatgatctgcccggtcaggtcctggtagctctgggtcagggcgatctcggtcaggttgtggcggatgcgctccagctgcgcgtcctggcctggctgcaggccttcggcgcgcagctgctcggtcaggctgcggcattcctcggccaggtccagggtgcggtgggtggcctgttcggtcatcgccaccacgtggtccaggcgtgcgcacgcatcgtccagttcgccggcctcgctgggcacggtcggcagttcgcccagggcctgccccagctcgcgggccagccgcgagaggccgctcatcatcggctgcgcgcgcagcgcgaccagtccgtcgatgcgttgccgccaggcggcttcgtcaccggactccagggcatccagggcttcctgcaggcgcagcgcgagggcgttcttgtcgaccgtggtatccatcaggcgctggccgccaggcgttcgaagatcttgcccagcttctcttccagcgtctgcgcggtgaacggcttgatgatgtagccgttcacgccgttctgggccgcttcgatgatctgctcgcgcttggcttcggcggtgaccatcagcacgggcagggtcttcagcttggcgtcggcacggatcgccttgagcagttcgatgccggtcatcaccggcatgttccagtcggtgacgacgaaatcgaagggctggctctgcagcagcgacagcgcggcatgcccgtcctcggcttcggcggtgttggtgaagcccagatcgcccagcaggttcttgacgattcgacgcatggtcgagaagtcgtcgacgatgaggatgcgcatgttcttgttcaaagcagagttcctttgttgttcattccgggcggccgggggcagtcgcctcggggatgttcattcttccaggccggcgtcgacggcctcgaaaatcttcaggcggccgcgcaggcgcagcacggcctggccatggatctggcagacccgcgactcgctcacgccgagcaccgcgccgatctccttcaggttcagctcctgctcgtagtacagcgagagcaccagctgttcgcgctcgggcaggtggccgatggccttgcccagctcacggccgaactcgccgcgctccagcacctgttgtggagtcgggccgccctgggcgacagtatccagttcgccctggtcttcgatgcgcgactccaggctcagcacctggccacgtgcggcgtcttccatcagcctcaggtactcgggcagcggcatctccatcgcggcggccacttcggtggcgctggcggcacggcccgtgctctgttccaggcggcggatggtggcggcggcatcacgggcacggcggtgcaccgagcgcggcacccagtcgccacggcggatctcgtcgatcatcgagccgcggatgcggatcgaggcataggtctcgaacgaggcgccctggtcggcgtcgtagctgcgcgaggcttcgatcaggcccatcatgccggcctggatcagatcatcgacttcgacgctggccggcaggcgcgcggccaggtggtgggcgatgcgtcgcaccaggtccgaatgctgggcgatgacctcgttggccgccgagcgctggacttccctgtactggtgggctgcgcctttcatgcggccaccccacgctgcttgaggatgcgttcgaggaagaactcgacgccaccgcgcggttcggtcggtgcctgccagcgcgcggtgcggcgtgcgatctcggtgatcgccagcgccgacgggctggatggataggccttcaccaccggctgctggcgctgcaccgacaggcgcagccagtcatcctgcggcacgcagcccaggtagttcagcgagacatcggcaaggaacttctcgcagacgcgggtcagcttctcgtacagcacgcggccctcgttcgggtcgcgcaccatgttggccaccacctggacgcggtccacgccgcgctcgcgcgacagcaccttgatcagtgcgtaggcgtcggtgatcgaggccggttcgtcacagaccaccaccacggtgtcctgcgcggcctggcagaaggtcagcacgccgtcggtgatgccggcggcggtatcgaccaccatgatgtccagctcgcgttccagttcggagaacacgttgaccaggccgacatgctcggccggggccagctcggccatgtgccggcggccggaagcggccgggaccaccagcacgccgctcgggccttcgacgatgacgtcgtccagcgagcagcggccggccaccaggtcggccagcgtaaaggtggggttcaagcccaggatcacgtcgatgttggccaggcccaggtcggcgtccagcagcagcgtgcgcttgcccatgcccgccagcgccaccgccaggttggcggacacattcgtcttgcccacgccgcccttgccgccggtcaccgcgatggtgcgcacagggccgagcggctcgctgcgggtggccgacagcgggaaggtcttggtcagcttggcgtactcacgcgacggcatggttcaactccgggttgcagggcatatcggccgctcggcgcaaatcttcaaggcgaagtacaagattggctgcactggcccggtgcaggtcctccgggacgtcctggccatcggtcacccaggtgatcggcagggcgtggtccacggccaccgacagggcgttgccgaagcggccggtctcgtccagcttgctcagcaccaggccctgcaggttggccgcaccgaagcggcgcaccacctcgtccatgtcgccgaagctggtgttggccggcagcaccagcagggtgcgcacctggcgcgcggcgcgcagccactgcagctgggcggccagggcacggtcgcgcgggcccaggccggcggtatcgatcagcaccagcttgtagtccttcaagcgttccagcagctggtccaggtcggtgccgctgttggcctcgtgcacggcgatgccgagctggcggccgtagccatacagctgttcacgggcgccgatgcgggtggtgtcggtggtgaccagggcgacgtcacgcggggcgtgcttctcggcgaagcgcgaggccagcttggcgatggtggtggtcttgccggcgccggtcgggccgaccagcgcgatcacgccgccttcctccagcgggtcgaccggggcgatcggcagcttgcgcgagatcagccccagcatcaggccgcggccacgatgggcttcggtttccagcgggatctgcatggccacgtcgcgggccagcccggcgtcgaaaccgtactcgtccatcaggtccagcgcggtggcgcgcaccgggctgccacgcaggcgctcgtcggtgaagcggttcatctcgcgctcgatcacctggcgcatgccggccacttcctggcgcagctggcggatctcggcgtcgtcctgggcaaccacggtcagcgtcggtgccggggccagcatgggggccgggctggcttcgacggcggcttcgaccgctgccggttcgctggcggcgatcccgggctgcgcgtcgatcacggcagcggtcggcagcggcggcggctgcacggccggggccacgctttcgtgatgcgcctcgtgcggcgggtcgatctggaagcgcgcgcggttggccggcacggtggcggccggtgcaacgatggcctcggcgaacggggcgaagatctggtccggcggtgccggttcgttgacggcggcgcgggccagggtggcggcgaagcccgtgctgccccgggtcggcacgatctcgtcggcgctgtccagagtgcggccggtggcaccgacggcggcgcgggcgagggcggccactgccgaggtggtggccgcgaccggttccggcgccggggagctgctgcggcggcgggtgacggcggcgatcaccgcgtcggcggcggtgcgcggcttgggtgccggcggcggtgcgacgtcacggcgcgaggcttccagtgcacgctgcacggcgctctcgtcgtagttggcggcggcgacgatctcgatgccttcctcgatccggcggttggacaggatcacggcgtcaggaccatgttccttgcgcaccaggttcatggccgagcgcatgtcggcggcgacgaatcgtttgattttcatgctgtggtcacggggcgaagacggcggggtggcggtcggagaactcgggtggtcggtggtctgcacggtgcgggttccccttggtatctgtctgttgcgttggttcgaaagtggtgtctgttttctggcgcatcgcagggcggcgtcagctgatcgttccgaccagcttcaggcgcttgtcctccggcacctcgctgtaggccaggaccgacagcgacggaacgctgtggcggaccaggcgggccagcgcggcgcgcaccgggccaggtaccagcacgaccgcgggctcgttgcgggcttcctgcttgctgacacattcggccaggctctggtgcagtcgctcagcgagtccgggttccagcgcggcgccgttgccctgcgtggactcctgcaagacacgttccaattgcgggttgagggtgaacaccggcagctccgccgacattccggcgatctcctgcacgatgaagcggcccagtgcggtgcgaacagcggcggtcagcacggccgggtcctggctgctgggcgcatgttcgaccagtgcctcggcgatcttgcgcagctggcggatcggaatgcgctcgaccagcaggttctgcagcacgcgcaccaccgccgacagcggcaacgccttcggcgtcagatcttcgacgagcttgggcgcgctcttggccaggttggccagcaggtgctgcacttcttcgtggccgagcagttccggcgcgtgctcacggatcaggtgcgacagatgggtggcgaccacggtcgccggatcgaccacggtgtagcccagcgtttcggcctgggcgcgctggtgcggctggatccaggtggcgtccaggccgaacgcggggtccttgccggcgatgccttccagcgcaccgagcgcgctgcccgggtccagcgccagctcgcggtcggggtggatctcggcggtggccaccggcacgccgtgcaccagcacgcggtagccgttggccggcagttccaggttgtcgcggatgtgcaccgacgggatcaggaagccgacatcctgggtcagcttgcggcgcacgcccttgatgcgcgccatcagttcgccgccctggttgctgtccaccagcgggatcagccggtagccgacctccaggcccagcggatcgaccgggcgcagttcgtcccagctcagttcggcagtcggtgccggtgcggccgggcggccgagtgcgttgagtgcggcggcatcggtgccaccgcctgccgcatcggcagccggcgccttgcccttgcggtacagcttccaggcgatgaagccgaggatcgcggccagcgtcaggaaagcgacgttgggcatgcccggcaccaggccgaccacgccgatgatgccggcggtgatcgccagcgcacggtactggccgaacacctggccggtcatggcctgagccatgtcctgcgagcgcgaggcgcgggtaaccagcatggccacggcgctggagaccagcagggccggcagctgcgctaccaggccgtcaccgatcgacagcagggtgtaggtggcggcggcttcgccgaacggcatgccatgctgcagcacgcccacggccaggccgccgagcatgttgatgaacaggatcaggatgccggcaatggcatcgccgcggatgaacttgctggcgccgtccatcgcaccgtagaagtcggcttcctcacgcacttcctcgcggcgcagcttggcttcttcacgcgtcagcaaaccggcgttgaggtcggcgtcgatcgccatctgcttgccgggcatcgcgtccaggatgaagcgcgcggtcacttccgaaacgcggcccgcacccttggtaatgaccacgaaattgatgatggtcaggatcgcgaacaccacgatgccgaccgcatagttgccgccgatcacgaattcaccgaaggcggcgatgaccttgcccgcggcatcgtggccgttctggccgttcagcaggatcacgcgggtggaggccacgttcagcgccagccgcagcatggtggtgatcagcagcacgatcgggaagatggtgaagtccagcgggcgcttcacgtagaccaccgccagcagcaccatcagcgagatggcgatgttgaaggtgaacagcgcatcgagcaccggcgcggccagcggcaccacgaccatggccagcagggccagcacgatcagcggcgcgccaaggccctggcggatcatttccagggcgcggcgggtgttgaaaccggcggagggctgggcgctcacgggcggcctcccttgccgaattcatccacctgtatgtgcggggcgtccggcatcgggccagtgcgccaggcgcgcagctggtagacgtaggacaggacctgggcgacggccgaatacagtctcacggggatttcctttccgagttggccttcccgatacaaggcgcgtgccaaaggcggggcggagacgatcgccaccttgttgccgtcggccacttcacggatgcgcagggcggtttcgtccacgcccagcgcgaccacggtgggggcgttcatggcgccgccctcgtacttcagggccaccgcgtagtgggtggggttgaccaccaccacgtcggcagtgggcaccgcctccatcatccggcggttggccatctgctgctgcagctggcggatgcggcccttcacctcggggctgccctcgctttccttcatttcccggcgcagttcctcgcgggtcatcttcagcttgcgcgtccagttccagcgctggtacggcgcatcgatggcggccagcaccagcatcgcgccggcggtggccagcagcaggcgcagggtgaagcccaggccatcggtgatggcggtttccagcgggtggtggatcagcccgcgcagggtgtcgaagccggtccagaccaccagcccggcggcgacgccgacgaaggccacgcgcagcagcgatttggtgaattcggcaatcgcctccgggccatacaggcgcttgagcccgctcatcgggttcatgcggttgatgtcgggcagcaacgccttctgcgaccagcgcaggccgcccatcaccagcggggcgacgaagctggccagcaggcagaccagcaccagcggtgcgatcaccagcaggaactgcagcagcaggtcgccgaagtggccgaacagttccttcgggttctgccgcaggctctgttcggggctgagcgcgtgcttcatccaggccgtggcgccacggccgatcgagccgctcatggccatcaccgccagcacgccggcgccgaacacggcggcggtgccaagttcgcgcgagcgcggcaggttgccctgttcacgggcatcgcgcaggcgtttttcggtcggttgttcggtcttttcgccggcggattcgttctcggacatcacgggcactgcggcagggggtgccggggtgcgtgcaagaaccgttccacgcctggcgtggatctaccgacggcccgttctgtagagccgagcccacgctcggctacggttggggccaggcgcgaagcacagccgggcatgagctcggctctacaggagagtgccgcaggaatcgttccgtgatggcgggcgcgcgtggcccggtgtcagccgggcgggtattgcggcggcgggctctgtgccagttccacccgcggccggggcaggtcgtgcagctgcatgaagcgcgccgcatcgaccgggcggcccagcaggtatccctgcaggaagtcgcagcccaggcgttccaggtaggcgcgctgcgcggcggtctccacgccctcggcgacgatgtccatgtccagcgcatggcccagcgccacgatcgccgagacgatcaccacgtcttcggcactgtgttccaggtcgcgcacgaacgcatggtcgatcttgatctcggtggccggcagccgcttcaggtacagcaggctggaatagccggttccgaaatcatcgatggagatgcccacgcccagcgccgacagcgcctgcagcaggcgaagactggcatcggtatcgcgcatgacggtgctttcggtgatctccagcaccaggtggcgcggggcaatgccatggcgctcgatcacctcgcgcacatcctgcagcaggtgcggcgaactgaactgcaccggcgacaggttcaccgacatcgaccagctttcatgcccggcgtcgtgccagcgccgcagctgctggcaggcctggtccagcgcccagcgcccgatctcgttgatcgcaccgctgcgctcggccaggcggatgaagcggtcggggggaatcaggccgtgttccggatggcgccagcggatcagcgcttcggcgccggccaccttctgcgtggccacgcggatcttcggctgatagtgcaggaacagctgctcgctgccgatggcgcggcgcaggtcggccagcagccggaactgctgctcggcgctgtcgttcatccagtcggcgaacagcacgaaggcgttgcgtccggactccttggcctggtacatcgccgcatcggcgaaggccatcagctggcgctcgctggcggcgtggtccgggcagatcgccacgccgatgctggcggtcacctgcagttcgttgtccggcagcaacgggccgctgcccaccgcctgcaggatgcgccgggccagggtcggcaggtcctcgtcgtgctcgatgcgcaccaccagcacgaactcgtcgccgcccagccgtgccagcatatcgtgcgggcgcagcagctggcgggtgcgttcggccaccgccaccagcagcgcatcaccggcctgatggccataggcatcattgacctgcttgaagccgtccaggtccatgaacatcaccgcgaagcggttgccgccctgttcggcctcggccagtgcctgcacgatgcgccgctgcagcagcaggcggttgggcaggcgggtgagaggatcgtgcagcgcggcctgggtcagttcctgctgcgcgtcggtcaacgaggtgctcagcatcgaattgcgcagccgcagcagttgcgcttccacgcgctggtccagccatgagaccaccagcaccacggccaggatcgccacggtcagcactaccaccagcatcgccagccactcgttctgcaggccatcgccgaccgccgcgccgcagacgctgccttccgggaagcgcgcagcggccatgccggtgtaatgcatgccgacgatggccaggccgagcaggcccgccgccgccagtcgatcaccgatgcgggtgcgctgggcgcgcagccggaacgccacgtacagcgcggtccaggaggcagccaccgccaccatcagcgagaacagcagccaacccgggtcgtagtcgatgcccggctgcatgcgcattgcagccatgccaacgtaatgcatgccggcgatgccggtgcccatcagcagggcgccgaccgccaatcgcgggtggggcagggtgcgcagcgagaccagccacagcgcgaacaccgatgaggcgatggcaagcgcaagcgagagcagggtgatgggaaggtcgtagcccaatggaatgggcaggtcgaaagccagcatgccgatgaaatgcatcgaccagatgcccaggcccatggcgaagccgccgcccagccgccaccaccaggccgcgcccctgcccggtgcggtcaccgtgcgcccggccatcgccagcgcggtgtatgaagccatcacggcgaccagcagcgagatcgccaccagccacgggttgtacgtgcctaccagcattcgtcagtctcccggacctgcctgtcgacggaaaccacggtggggcatgcatgaggcaggccgacgcacgacgccggccatgtgcggcatccccccggttgccgcgcattcactctaacgcgcagaccgggggggactccaagcggcaatacgtgaaattgcgcctctgtagagccgagcccatgctcggctgcctccggcaggagcggcagccgagcatgggctcggctctacagaaacaaatgcatggcaagcagtagaacgtgatgatcgggtcagtgtgtgaccgcgtccgcagcctggaaggcggcgtcgaacaggcgctgtaccggcggccccatttccccggccagcagggccagcaggaacaggcccagcagcagcgagaccggcaggcccagctggatcggattcagcgcaggggcggcacgcgccagtacgccgaaggccaggttcaccgccagcatcgccacggtgagcggaatggccaggcccagcgcgccgcgcagcacggtcagcaggaaggtcggggcgatgctgaagaaggcgtgcggatcgggcagtggagcaccgatcggcagtgcgcggtagctgtcgaccagcagcgaaatcaacgccaggtggccgttggcggtgaagaacagcaggccgaacagcaggtagaaccactggccgatcacacccgaagtgccaccgcgcagcgggtcgctcatctgcgcgaaggccaggccggtgccctgcgcgatcagttcgccggccatcgcaccggcttcgaataccagccgcagcatgaaaccgatggaaacgccgatggccagttcgcgcgcgatggtcagcaccgtagccgcgtcgaagccggtccagtccggtaccggtggcagcaacggcgccagtgcaatggccagggtgccggccagtaccacgcgcacccgcgacggcaccgcacgcgtgccgaccatgggcatggccatcgccactgcgccgatgcgcagcatggtccacagcaccgtgccgatcatgccgaaggcctgcaggccgtcggccgccatctgtgtcgcggcgtccatcgaagcgcgtgccctagccgatcaggtgtgggatgcgctggaacagcagcgtggtgaattcaaccaggtggccgatcagcaggctgcccagcgcgaacagcaccgcggtcagcgctgccgccttggcgacgaaggcaatggtcggttcattgagctgggtcgcggcctgcaccacgcccaccaccacgcccaccaccagcacggtgagcagcaacgggccggccacccacagcacggtgatcaggccgccacgcagttcggtcaaggcaagttcgggagacattcgggttccaccttcttgtatagagtcgagccatgctcgactgtctttcaatcgcgccggatcgcgtcacgcgggattgaagctggccgccagcgtgcccacggtcagcacccagccatccaccagcacgaacagcaggatcttgaacggtgccgacaccagcatcggcgacagcatcatcatgcccatggacatcagcacgctggcgacgaccagatcgatgatcacgaacggaatgaagatcaggaagccgatctcgaaagcggtcttcagttcgctggtgacgaacgaagcgaccagcaccgggaacgggatcgcatcggggctggcgtaggtgccgtgcccggcgatgccggcgaaggtcatcaggtcggtctcgcggatctgcgccagcatgaacccgcgcagcggctgcgtggtcaatgtccaggcggtctggaagtcgatgtcgccgttgagatagggcgccatgcccgtgctccacgccttgtcccaggtcggcatcatcaccatcgcggtgaggaacagggccaggcccagcagtacctggttggacggcgtctggccggtacccagtgcctggcgcagcaggccaagcacgatgatgatgcgggtgaacgaggtcagcaccagcagcatcgacgggatcagggtgatcgcggtcatcagcagcagggtctgcagcggcaggctgaccggctggccgccgatcttgccgacgttgacgtccggcagcggggtggccggggcgccgggcgcggcgaacgccagcaccggcaacaggcacagggcaagcaacagcagccacggcatcagggtggcaacacgggtacgggtgacacgcatgtcaggggtccttgcgcagccgctgctgcagcagctgggcgaaattcggcaggttcttgaaatccggcacgcgcaccggcgccggtggcggcaacggttcgggcagggtatgcagggtgttgatgccgccggcagtgacgcccagcagcaattgctggccgttgacctccaccaccaccacgcgctccttggcgccgacgctgaggctggccaccagcttcatgccttcggccgggcggaagccgctgccgggcatgcgcttgagcagccagcccaggccgatcaccagcgccagcaccgccagcagcgccagcaccgcaccgaacaggctgggtgcggcggccgcgtgctggccgacctgcgggccgatcggcgctgcggtcttgccgaccgccagcagggtggaggccagcaggctcaacgcagtctccggatccgctcgctcgggctgaccacgtcggtcaggcgcacgccgaagcggtcattgatcaccaccacttcgccgtgggcgatcagggtgccgttgacgaacacgtccagcgattcgccggcaccgcgctccagttccaccactgaaccctggttgagctgcagcaggttgcggatcggcaggcgggcacgaccgacttccagcgacagggtcaccggcacatcgaggatcacgtccaggttcaggtccggaccgttggcctcgtcggcctgcaggctgctgaactgggccggggtcggttcgagggcgtcgatatcgttcattgcgggtcttcctggatgacgggtacgcgcgggcgggtgcccggcggatgggtagcggtgatcttcacggcgttcatgccgttggcgatgccgaactcgccggtgaacacagggatgttctccacgcacagcggcacctgcgggctcagctcgatcggcaggatgtcgccgaccttcagctgggtcaggtcgcgcagggtcatgcgcttgctggccagtacgctggacagggtgacttcggcgatgttgagctgctcgcgcagggtcttgccccagctctcgtcgcggtcgttgcggtcgctctggatgccggcgtcgagcagttcgcggatcggttccagcatcgagtagggcagggtgacgtggatgtcaccgccgccgccgtcgagctcgacgtgcaggcggcacaccaccacgtactcgcgcggggtcacgatgttggcgaaatgcgggttgatctccgagttgatgtactcgaagtcgacgtccatcaccggtgcccacgcttcgcgcaggtcggcgaaagtctgcttcagcagcaggtggatcacccgcatttcggtggccgtgaattcgcggccctcgatgcgggtcgggtagcgcccgtcgccgccgaagaagttgtcgacgatggcgaacaccagggtcggctcgaacacgatcaggccggtaccgcgcagcggcttgaagcggatcaggttcaggttggtcggcacatacagcgagtgcatgtagtcgttgaacttgatcagttcgatgccgcgcaccgacagctcggccgagcgccggatcagattgaacaggccgatccgccacaggcgcgcgaagcgctcgtggaccatttccagggtcggcatgcgaccacggatgatgcggtcctggctggcgaagtcgtacgagcgcgcttcgcctgacgggggttccgcatcggtctcgaccgcgccgctgtccacgccgtggagcagggcatcgatctcgtcctgggacagcagatcattcatcggggggccttactgggtcacgaagctggtgaacagcagatcgtcggcgccgttgctgccggtctcggccttgagcaccctctgcacctcggccagcgaactggcctgcagcttctgcttgccggcgacatcggcgatctggtccgggctgacctgcgagaacagcatcagcaggcgcgcgcggatggccggggcatgggtcttgatcgcttccagcgcggccgggtcgcgggtcatcagctggacctccagctgcaggtagcgcgggccgtcgaccgggccattgaggttgaccacgaacgccgggtccagcgcgaagtactgtgccggggccggggtcgcgctcttcttgggcgcctgcgcggtcttctcttcgtgcttggactgggtgaagaaccacacgccgccaccagcggcagcggcggccagtacggccaccagtgcggtgatcaggatcggactacgcggcttggcggccttgtccttctcggcggtcttcttggttttgtcagcggctgcggccacggggtgaagctcctgagggttgcttcaccgggatatgcaaggggtgtgccgaaggctgggcccgcagggtgcgacggaattccgtcggggtgcaggtagggccgtgcggagcaagctcagcacccaccaacgcaatacggggaggtgccgaccgcctgccctggtgggtgccaaccttggttggcacacctgtcaggcgtaggcgtccagcaagccgcgctggcggatcaactgcgcggacgacacgctggcatcgcccggcgtcggttctccgtcgccggtcatgccgccgccaccgggttgtcccgacgcattgccgtcaccagcagacgcgtggtggccgacatcggcgtgagccagctggaagccctgttcgcccagcagctcgcgcaggcgcggcaggctgctttccagtgcctggcgcacgtccacgtgcgggctgctgaagctggcatgcaccttgtcgccgttcaactgcaggcgcacgtcgaccggccccatgtcgtccgggctcaggcggatgtgggcatggccgatcttctggtcggccagccagcccaggcgtgcgccgatggcctggtcgaagccatcgtcacccagcacgggcttgggcgtgggttcgccattgaagatcgcgttgccggtggcgagcgccgccttcaggtcctgcacggcggcggctgccggtgcgtgcagcaacggtgtatttgcgcggtcgccaacggcggccacgtcactgccttcgccgcgctcgctgcgcttgccgggcaggatcatcgccggcaatggcagcgcggtggcatcctccgcgctggtcgccgccggtttgccgtcggccgccacgggggctgcggttgccgctgccggcgcggctgcaggcagtgtcggggtcgcggcgggggcagtggtggatagcgccgtaccgtcgctggccagtgacggtgcagcgctgcccgccagagcgacggccggatcggcaggcgtcggcatcgccagcaccaggccggccaggccgatcggtggccacggggcgtcctcggtcgcggcgggcttgtccttgtcggtgccgggtccagccgggggcggggcaacgggcggtagcggcggcgtttcggcagttgccgcttccgcgtccgcgctgcgttcgcccggtgcctggccattgctgtcggcggtcgatggctggctgggcgtggacggcgtcggtgtggtagcgctgccggcaggcgcgggcgcggagggcgcaccgccctgcagcagctggctgaagtcctttgcgccttcgctgcgcgcggcgcgtgcggcactgttgctggtggcgggcgtggccgggttggcgctgctggcgagcggggcgggcatcacgggcggcctccctgctcggcgccgtcctggtcttcggcctgcaccaggcgcgcgcgccgcgcgccaatgtcgtccatctcgcgctggtcgcggcggtcggtcaccaccttttcctgcgcgcggtagctggcggccagctgctccagcaccgccttgtcacggctggccaggatcagccgcgcgcgctcggcctccactttttcgcggttgccgttgaccgtggcctgctgctgctcgaccgcactgtccaggcgatcaaggaaggcgcggcggttcagcagctgtgccgggctggtcgctgccatctgggcgttggcgtactcctcggcatagcggcgcagttcgtccaggcgcgacagatgggtgtcgagcacgcgctggcgttcggccaggtcgcgggcgaccgcgtcctcgtgttcctgggcccgcttgagcaggggatcgatgcgcttggactggttcatggcttaactctcttgttccaccaggcgctgcagcgccgcctggctgtgcgggagatctgcggccttggcaacgtcctggccgaggaactccatgatttccggccagcgttccagggcttcgtcggtggccgcgtcgttaccacgctggtaggcaccgatcgcgatcaggtcacggttggccgagtacgccgagaccagtcgcttcaacttgcggatgcgcaggcgccacggctcgtcggcgatttccgtgaccacgcggctgaccgacgattcgacgtcgatggccgggtacaggccgctgtcggccacccggcgcgagagcaggatgtgcccgtcgaggatcgcgcgtgcggcgtcggcgatcggatcctgcggatcatcgccttcggtcagtacggtgtagaacgcggtgatcgagccgcggccctttgcgccgttgccagcgcgttcgaccagcgccggcagcttggcgaacaccgagggcgggtaaccgcgggtggtcggtggttcaccgaccgacaagccgatctcgcgctgcgcctgggcgaagcgggtcagcgagtccatcagcagcagcacgttcaggccctggtcgcggaaccactcggcgatggcggtggcacggtaggcaccgtgcaggcgcgccaagggtggccggtcggcggggctggccaccaccacggcgcggcgcaggccttcctcgcccagcgtggtctcgacgaaatcgcgtacttcgcggcctcgttcaccaatcaggccgaccacgatcacgtcggcagcggtgtagcgggtcatcatgcccagcagcgtcgacttgccgacgccggaaccggcgaacaggccgacacgctggccgcggccgatcggcaacagcgcgttgatcgcgcgcacgcccacgtccagcggctgggtgatcggttcacgcgccaacggattgatcgacacgccggccatgccgacatgcccttctgcgcggatcgggcccttgccatccagcggcacgccgtcgctgtcgatgacgcggccgagcaggccttcacccacttccacgccgccacgccgcgccgacggtaccacgcgggcgttgggcagcaggccgtgcagttcggcgctgggcatcaggtaggtgcgctcaccggcaaagccgaccacttcggcatcgacccagccaccatcgaccacttccaccttgcagctggcgcccagcggcgcctcgcagccgaccgcttccagggtgagcccgaccgcgcggcgcagcacgccctcgcggatcagcccacggccatgcgcggtatccacgcgcaggccgtccaggcgccgggccaggcgcaggttgcgggccacggcccagtcggccggcggcggcgtcgtttgcggtgcggcgctcatgccgtcgccccggtctggcggatcaccgcatccagcgcaccgcgcaggcgggcctccagggtgccgtcgatgcgtacggcttcggcgtgcacgcgcaggtcgccacggctgaggctggtatccggtaccaggcgctgcgccggcgacaggttcagcagcggggcaagcgcggcgatgtcatccgggtgcagccgcacttccacctcgcgggtgctgccgcccacggcgtcaatcgcttcgccgaccagctgcgccagcagtgccggctcggcctcgtaggcgcggccgaccagcgcgccggcgatgcgcaccgccagttcaccaagggcgccgaccacttcgttctccagccgcaccagcggccggctgaagttgtcgaggatgccttcgatctgcgcggcgaggcgacgcacctccgcctggccctggccgtagccttcggcatggccctgatcgaatccttccttctccgcgctgtcctggatcgcctggatttcctccagggtcggcagctgcagcggcggctccggttcgtgttccgggtccggctcggtgagttcgaacgcgtcctcctgctccagcgccggttcgggctgggccagcaggtccggggcaagccagcgcacgacgttgctcacagcatggcctccgcgctgccgccgatggtgacggtgccttcatcggccatgcgcttgacgatggccaggatctcgcgctgcgcgccttccacgtcggacaggcgcaccggcccgcgggcttccatgtcttccagcaggatctcggccgcgcgctgcgacatgttgcgggtgatcttgtcgcgcaccttgatgtcggcgccgcgcagggccaggcccaggcgctcgccgctcacctcgcgcagcaccagctgcatctcgcggtcgtccaggtcgaccagatcgtcgaacacgaacatcaggtcctggatgcggttgctcaacggcgcgtcgatgcgggcgatttcgcccaggatcgcctggtcctggccgctgtccatgaagttcaggatgttggccgcgcactgcacgccaccgatgttcgacgacttcaggttctggttgccggcgaactggcgctccatgatctcgttgagttcattgagcgcgttcggcggaatgccgtcgagggtagcgatgcgcagcagcacgtccacgcgggtacggtccggcagcagtttcagcgcgtcggcggcctggtcggtttccaggtgcgccatcacgatggcgatgatctgcgggtgctcgttgcgcaccaggtcggccaccgcacgcgggtccatccacttcagcgcgtccaggccggtggtgttgcggccgagcaggatgcggtcgatcaggttgccggccttctcgctgcccagcgcctgcaccagcatgttgcggatgtagtcgtccgagccaacgccgagtgaggtcttcgagcccagctcctggccgaactggtccatcacccgttccacctgctcgcgggtgatgtcggtcatggtggccatggcgatgccgatcttctgcacctccttgggttccatgtggcgcagcacttcggccgcatccagctcacccagcgaaagcagcagtacggcggcgcgctgcacgccagtcagtgcggcctcagtcatttgccacccaacccttgaccacctgggccacgcgcttggagtcggtcttcacggcttcacgcgccatccgcaatcgttcctcatatgaatccaccggcagggccagtgcttccggcccgcccaggctggcccggtcagcgcccagcgccggcagcggcatgccatcgtcatcgaccagctgcacgtccgcggtatgcggctcgagtgcctgttcgtcgttcttcctgctctggccggtgatcgcgcgcagcgccggacgcagcacgccgaacagcagcgccagcaccaccaccgcgccaagcagcatgcggccggcatcgtgcacccacggcagctcccaccacgacgggccttcgaccggcgtggtgtcacgcacgaacggggcattcatcaccgacacggtgtcgccacgctcggcgttgaagccgacggcctgcttgaccagcgcttcgacgcgggtcagttcggcagccgacagcggctgcgggctcatcttgccgttggcgccggcgcgcggcacgttgtccaccagcaccgccaccgagacgcgcttgatgcggccggccggctggcgggtgtgctgcagggtgcggtccagctcgtagttgcgggtcgcgttcttgctgctttcggtcggggcctgcgcggtggccggtgcggcctgctggcccggcgggctgttgctggtcgcacccggcacgccctgcgggcccggcgtgctggtggtgttctcgctcatctgctcgctgcgcagcttctgcggctcgccgttgtagagctcgcgggcttcctcggtcaccgagaaatccatgtccacgctcacttccgggttgacgcggccggggccagtcatcggctccagcagttcgcggatgcgctggttgaacgaagtttcctggcggcgcacctgctcgaactgggccgcgttgaccgccgcctcgctgttcgggtcggtgatgctgagcatgcgcccgctctggtcgaccacggtcacccgttccggcgcgaggtccggaatgctggcggcgaccatgtgcacgatggcatcgacctggctgcgttccagctgctggccgccacgcagttccagggtgaccgaggcgctggccacgtcacgctggcgggtgaacgcgctgggcttgggaatggccaggtgcacgcgcgaatcgcgcaccgggcgcagcgtgttgatggtgcgcgacagctcggtttccagcgcgtgctggtagcgcgcgctttccacgaactggctgacaccaaagccggggtcgcgttccatcagctcgaagcccagcttgccgctgtcggtcaggccggagccggccagcttcaggcgggcatcgtgcaggttcttttccggcacggtgatgccaccggtggccgggtcgagcgcgaacggaatctgcgcggcgcgcagcaggtcggtcgcttcagcggtcgccttctggtccaggccggtgtacagcgggaccatgcccggcttctgtgaccagaagaacacggacaggcctgccgccaccgccaccgcgatcatcgccatcaggcccagccgacgggtgatctgcagactctgcaggcggtcgaaccattgcccggccttctcggcgttcaggctgtccttggagagcgtcagtgccatgcgtcaacgttccttacagcggcatgttcatcacgtcctggtaggcctggacgagacggttgcggacttccacggtggcgcggaaggcgatctgggactgctgcgaggcgaccatcaccttggccaggtcggcgctggggtcgcccatctcgaaggccttggcgagggcgccggatttctgttgcgcatcgttgacgccggcaatcgcaccacgcagggtttcggtgaagctggccggctgcacctgcggcgcatccagcaccgtgcccggcagggcattgctgcgcggcgtttcgcccagcgggttgagcgccggctgtcccatctgggtctgataggagcggatctgcgaaaggatcgaagtgacggagtgggacatctgcaacggttccagaaacagggatggggttgtctgctggagccagtgcaagtgccgtgccgaaaccggttttcgattcagtgaagtgaggaggttgggtgtgcgtgcggggttgcaccccgcgccccgcggtagtgccggccgctggccggcaacctcaacggcaacggccgaagccggagccggagccggagcaacagcagaagcgggtctactgagggatggcggggtgggtccggttacgggggacgccgtaaatccgtccatggaggctcggtcgcgccatccatggcgctcacgcccccgcaaccggaccccccccgccttcgacaggtggccgcgatctgttggaacctgctgctgatggtgggtgccgaccgttggtcggcacgggctctgaccccattggcggcgccatttaaccggcgtcggttttctggcctatggctgcagggtccatcggccggaattctggcgctggcgcggtgcgatggggccgtcatgctgggtgtagatgaaacggccttggcggtcgctctggcacgtcagcagcagggtgtagtgggcggggccggccgggtgggcctcggtcatctggatttccgcgatatgcggggccaggcgctggtagcggtagctgccgccgatgcggcggtcggtgccgaggatgtccagcacgtactggctgccagcaaagctgagctgcaccatgcgtccggcgttggggttgtccggcgcgtacaacgggtcgctgaggttggtgaactggcgttggtcgagcgtggcgggcagggtgcagttggccgcggtggccagggccgggcagagcaggacggcgagcaggatcaggtgatgcatggtgggacctccttgggatgtccctgccatgctccgcactgcgattccgttgtctctaggaaaacgtgcaaatgcaatggggtcagatccctttccgcaggaaagggatctgaccccgggcaccagaaacaccaacgcccgggcaagcccaggcgttcgtgcccccttcatgcgggtcgcgcgcttcagccggccagttcggcctgctcgcgctcgatgccgtacttgcgcagcttttccaccagggtggtgcggcgcaggccaagcagctgggcggcgtgggcgaccacgccctgggtgcgttccagtgcttcgttgatcagccccagttcgatgttggccatgtggttgcgcaggtccaggccatcgtcgggcagtgccgccggcgccgccgggcgattgacggcgatgccgtgctccagcgccggctggttgccgctgccgggcgtgtggaacgagaagctgcgcaggtccaggcgttcttcgctggcaaccggcgctgccggtaccgctgcggccaccgctgccagcgcggcatcgccacgatagcgggccggcaggtcctgcacgcgcaccgaaccacccggatgcagcacggccaggcgctcgaccaggttggtcagctcgcgcacgttgcccggccactcgtagccggccagcgcctgcagcgcttccggggtgaagcgcacttcgccacggccggtgcgggccagctgcgcggcgatggtttccaccagcgccggcaggtcttcgcgccgttcgcgcagcgcgggcacgtcgatcgggaacacgttgaggcggtagaacaggtcctcgcggaacttgccctcggcgatgcgggtctccaggtcgcggtgggtcgcggccaccacgcgcacgttgcagcggatggtctggttgccgccaacgcgctcgaaactgcgttcctgcagcacgcgcagcagcttcacctgcatcggcaggctcatgtcgccgatttcgtcgagcagcagggtgccgccctcggccatttcaaaccggcccttgcgcgcggtcagtgcgccggtgaaggcgcccttctcgtggccgaacagttcgctttccagcaggtcggccggaatggcgccacagttgatcgccacgaacgggccatcacggcgcggcgagcgctggtggatggcgcgcgataccacttccttgccggtgccggattcgcccagcaccagcacggtggtgtcgaacgcggccacctgctcgatcatggtgcgcagcgcggtgaccgccgggccgttgccggtcggcccctggtcctgcgcggcgccggcctggtgctcggcatccaggcgcttgaggctggcacggcgcagcagggcttccatctgcgcgtggcgcagcggcgtttccagtggccagatgttggcctcgtgcagcccgtgctgctgggcaaacgctgcagcatcaccatcggccagcagcaccggcggcggcaggctgctgccgcccagccagtggtacagcgcagtgctggcggcgctgtcgtccaggctgccgacgatcaccgccatccagtcgttctggcgctggcggcccaggtcgaagtcggccgcgtcggacacccagcgcgggttgaagtccatgaattccagcagggcaacggtgcgctctgcgcgcacggcgtcgttgtccagcaccaggatgcgcgattcgctcacgatcgatcctccctgaggccttccaggatcggcatgacttcctggatgtaggacagcttgctgacaaagttgtcggcgccggcgcgcagcgcgtgttcgcggtgctcggcgtcgtcgaagtggctggcgatcacgatgtacggtgcatcgtcctgcgacttgatcaggcgggtcgcctgcaggccgcccatttccggcatcgccaagtccatcagcaccacctgcgggcgcagcgtttccgagcgctcgatcgcttccaggccgttgccggcactgccgacgatctgcagccagtcgatcttgcggaaatggcgcatcgccgcgttgatgaagccctcgtggtcatcgaccagcaggaccgtgagcttgttcatgtccaacatccttttcagcccacccgggccagctggggttgcctggcgctgagccggcgccgttcgcgggccggggcgatatccagttgttctcggtattttgcgacggttcggcgggcaatgttcaccccctggcgcgacagcaggccggcaatggcctcatcggccagcgggcggccggccggttcggcgtcgatcaggcggcggaccatggccttcaccgcctggccggagacgctggcgccttccaggcgcacggcgaagaagtgcttcagttcgaaggtgccgcgcggggtctgcaggaacttgccggtggtgatgcgcgagacggtggactcgtgcatgccgatctcctcggccacttccttcagggtcaacggcgccatggcctcttcgccacggaccaggaaggcggcctggcgctcgacgatcacccgcgcggtgcgcagcagggtgtcatagcgcatcgacaggccgcggctgaaccagcgcgcctcctgcagcatttcgcgcagtgccggggcggcgtcgctggtctcgaccagggcctgttcgtactggctgttgatcgacacgcggcggctggtggccgggttcagtgcgaccttccactgcccatcagcgtgccaggcgaccacgtccggcaccaccacggcgttgcgttcgggcagcaggctgtcgccggggcgcggctgcagcgataggatcaggcgcaccgcctcgcgcacgtcgtcgatctcggcgtcgtgctggcgggcgagggcggggtagtcgtgggccgcgagcgcgtcgagcgcgccatcgagaatgcgtgccgccaggtggcgggccggcaccacgccatgcaggctgcgcagctgcgcctgcaggccttcgcgcaggtcctgcgcggccatgccggcgggctcgccatgcagcagctgctggcggatggcttccacgccgtcggcagcgatgtcgaactgggcgctggccagcagctgcagctgggccagcggcgcctgcaggtagccggcttcatcgcagtggtccagccagaacgcggccaccgccagctggcggtcgtccatgtccagcgccaggcgctgcagcacgcgcagctgcgggtcggtcgactcgccagcggcgatgcgtgccatgcggtcgtcatcaccgtcctgccaactggcgccggccacgtcccacatcgacggctcgggcagctcgtcgaaggcggcggtgtcgagggtggtggcactcgcttcggtggcgtcggcagcgggcgcttcggcctcctcgatctccagcagcgggttggagtccagcaggcgctggatttcctgctccaggtgcaggccatcgagctgcaacagtcggatcgactgcagcagttgcggggtgaggtggagttgctggcccagctgggtcgagagtgcagccttcatcgtggttccccggcaccgctccccggcgccttgtggaacgcatcttgcttttgatccggcgggggcggaatcggggggttcctgatgcatttcgtggaactcccgacagggtgtaggggaattccctacaccgacgcgggaaattgacgaaatgcgccgccaagtcattgatttgtggtggagaagccgctgggcgcgcggcggtcggggcacggattcctgtcagggaatgtcggggtgacgggatgtcgtcgccaacgcagggtgtcgcggggtcagatccgtctccgcgggaaagggatctgaccccgataccggcgcctactcgagctcgtgctgatggcgtgcggccagcagcagcaggtcattggcgcggcggcagcccagcgattccatcatccgcgcgcggtgggtctccaccgtcttgacgctgatgccgagatcggcggcgatttccttgttgctctcgcccttgccgatgcggcgcaggatctcacgctgccgtggtgagagtgcggcgatgccggtgggtttctcgcggcccagcatcggcgccagcatcttggccgagatctgcgggctcaggaacacctggccggcgtgcgcggcccgcagtgccagttccagttcctgcggtgcggcgtccttcaccacgaacccgaccgcgccacgatccagtgcatcgcgcacgtgggcggcatcgtcgtgcatggtcatcatcaccacccgggtaccgggggcacgcaggcggatgtcgctgagcgcttccaggccggtgcggcccggcagcgagaggtccatcagcaccacatccggtgcgtgctgcagggacagttgcagtgcctgttcggcgttgctggcctcggccacgagctgcacgtcggcaaacccctgcagcagccgcgccaggccggcgcggacaagggtgtgatcgtcgacgatgagaactcgcacaggcacgcagcagatccgtgtaggggcatccaccttaacttagctgaacgggcgcgccaagggtcggccgtacagcgccaagggggcgggtttcagcgtgcgcggcgtgcctcggccacctggcggcggtgcaggcggaacaggtgccgctccatcgccatctccaggccatcacccaaacgctggaagcgcagccacaggaagtgcccgccgctaccgtcggcggcttctgcgacgacctccaccggcaggtcgatgtggtcgggcagccagtcgctgggctgcaggcgcaccacgccggcctggccggggcttgcaccgctgcgcggacccagctgcaggcggatgccgcgccgcgaccagcgcaccggtcgcagggtcagctcctggccctgctggcgtaccagccggccaagcagcaccatcgccaggtccagcttggcttccagccgctgcaactgcaggctggcttcgttgcgttcgtcgtgctcgtcgccgcggctgtcctcgaccagtgccaggctgcgcagcaggccttcggcgctgctggtgcggccggccgcgctgcccgcctggaactcggccggcagggccagttcgcagctgagcgtctcgtcgaacagctcgctttcggccgggtgatgcagcgaggtggtcggcagcgaggtcatgccagcgattctgcctgcagataggcatgcgccgcgcgaagggagcgctggccgtcgttcatcagtgcggccacggcatcacggcgctggcgcagcaggccgagcagactctgctggcgctcgaacagggcgctcagcggcgcgtggtccgcagcggtcagcggctggctgagcagggcgtgcagggtgctgtcgtggccgtcgagcaggctgtcggcctggtcgagggagtcttcgcccaaggctctctcgaaggcatccagctgcgcatgcagttcctgcaggctcatggcgccaccgcggccgggcggcgctgttcgtgcgggatcgcgttccaggcgctgtcgatctcgcccagcagctgcagcgattcatccagcgcggcacggtcgttgtgcaggttggcctcggtcaggcgctgcagcacgtagtcgtacagcgccgacagatttccggcgatctcgccaccggcctcatggtccagcgagccgttgaggtggccgacgatcgcgcagacttcgccgatcgccttgcccttgccggcctggtcaccgcgttcaaggctggccagggcgcggcgcacgcgctccagcgcgccggccagcagcatcgccaccagcttgtgtggatcggcatcggcgaccgcactggtcacccccacctggcggtactgctcggcatattgacggctggaaccgtacattcgtgattctccttgcgcggggtgccgtcgggtgatcgcggggaccggtgccgacggcgcggcgatgattgctgttgcgtccgttatcggtgcattgcgcggcaaacttgagtgccgtgcatgttccgtcagcggttcaactgggccagctgctgctgcagcgcggtgttgctctgctgcagcttgcccatcaggctgtccagcgccaggaactgcttcttgtagcgctcttccacgctcttcatgcgcgtgtcgaggtccttgcggcgcttgtcgatgttgtccagcgtggtgttcaggcccttggtgcgggcaacgaaggcgccttccttgccgaccgtggtgctgacatagccgtcgaccagcgtgtacagcttgccggcaccgccggtatcaccggtgatcgcctggcgcatcttctccggctggctggccagtgcggcggcgaacttggtggtgtccaggatcagcgtgccgtcggcattgggatagccacgggtatccaggccgatcgccttggcatcgagcttgtcaccggccaggtccttgagcacgctcgacatcaccgagcgcagctggctggtggcgccgcgcatctgcgcatcgccggtcagcgtggaggcttccttggtcttggcgtcgtacttggtttcggtgttgatcgccgccagtgcagcgttgtaggcggtgacgaactcctgcatcaccttggtggctgccgcagtgtccgtgctgatggtcaccgtgctggtgcccggcatcttcaggttcagggtcaggcccggaaccgcatcggccacggtgttgctggcgctgacgaccttcacaccatcgatggtcagctcggcgtcggcggcggcggtgttctgcttgaggctgttgaccaggccgcccagtttggcgtcgctgccggcgtattcgagcttgatcgcgttggcggcaccggtcttctcctgggcgatcgacaggtactggttgtcgccggagctgatcagggtggcctgcacgccttccttgcggccggccgcatcgatcttgttgcggatggtggtcagcgtgtcgccgtcctccacctccacgttcatggtcttggccttgtcgcccacgccaacggtcagcgtcaaggttccggcagcaaacgtgtcagtcttgggtaccgaggtatcggcgatcagtttgtgcgctgtcgccagcgaggtgacattgaccacgtgcgtgccgttggaggccgcagccttggtggtgccaacgtcatacagcgcgaccgacgccgtcaggatctcgtcggtgcccttgtcgccgcccttgctggcggtcaccgtgcgcgtgtcgaacgccgtggtggccttcagtgcggtcagcgccgtcttcagcttgtcgaaggcagaggtgatggtgccgatcgacgacaactgcatcttggccttggactgctgcaggttcagcgcattgtcggcgggcttgcggtcagctgcgaccagctggttgacgatgctggaaatatccagtcccgagccaatgccaccgtatccaaagtctgccacgtcgtttctcctggtatccgggcccggccgtagtgcggtggcccgtcgtcaacgaaaatagcggcctgcgccgctgggtcttgaggacttcgtcgatgcacgtgccgtgccaatcgcctggcgcgggttctggcacgcgggttgcaggagggctggggcagggtgcgggtaggttcaccgcgggctgccgggagtctgcaaaaagccctcccccaatgcaggggagggatcaggctactgacaatcggggggagacgaagccgcccggtacgtacagtcaaaggtacagcgctgaaagagaggtccgcaggagcgggcgatgccaagccggttcgggagtgatcccgggccgggcatggcccgcgccttcgtgcatcgtggcttcccggttgccgctaccgtcggttcgacccgacggtagcggcgccttcttgccgtggatcagcgcagcaggctgagcacgccctgcggcacctggttggcctgggccagcatggccgtaccggcctgctgcaggatctgggtgcgggtcagttcggcggtttccttggcgaagtcggtgtccttgatgcggctgcgcgacgccgacaggttttccgacgaggtctgcaggttggccacgaccgaggtgaagcggttctggatcgcaccgaggtcggcgcgggtgctgttgatcgcacccagggccttgtcgaccacttccagcgcctgctgggcgccgagcacggtgctcacgtccagcttctgcacgttggccgaggtatcggtgccggcagtgtaggcgcccgcagctgccgcggtgccccaggtcttggcggtcgcgtcgtagtcgctgcgcatcagggcgatatcggcggcggcgacagccttgccttccttcaccgagctcagcttcagggtgccgtcggcattggcttcggcgtagatgccggcctcgccgatcttggcgttgatggcggtggcgacggccttggaggcgtcggccgtggtggcgccggccttcacttcaaccgtgccgatgtccacgcccatcacggtgccggagaaacgggcgccgtcggtgctggcagccagggcagcggtcgcgccggtggcgaaggtcgaggtgcccagcgagccggccttggcatcgatggtcttgtcgatggcgatggcctggccggcattggcgccgacctggaacagctggctggagaaggtgccgtccagcagcttggtgccgttgaagtccgactgcttggcgacgcggtcgatttccgagaccagctgggtcacttcggcctgcagcgccttgcggtcgctggccgagttggtggcgttggaggcctgcaccgacagctcgcggacgcgctgcaggttgttgccgatttcggtcagcgaaccttcggcgacctgggccagcgagatgccgtcgttggcattgcggatggcgacgtcggtaccgcggatctgggtgccgaagcgctcggagatcgccaggccggcggcgtcgtccttggcgctgttgatgcgcgaaccggaggacaggcgctggatggtggtagccagcgagctgccgctggtgctcaggttgcgctgagcattcagggacatcgtattggtgttgatgacttgtgccatggtgcttttcctttggcgaaggtggaacgtgtttcaggatccgggcgccgcgtcatgcggcgcccggaggtcgatcagcgagcggatcagcgcagcaggctgagcacgccctgcggcacctggttggcctgggccagcatggccgtaccggcctgctgcaggatctgggtgcgggtcagttcggcggtttccttggcgaagtcggtgtccttgatgcggctgcgcgacgccgacaggttttccgacgaggtctgcaggttggccacgaccgaggtgaagcggttctggatcgcaccgaggtcggcgcgggtgctgttgatcgcacccagggccttgtcgacgatttccatcgcctgctgggcacccttcacggtgctgacgtccaggtcgctggcgtacttggcggccggcgcggccgtcgaggcggtgaaggtcggcgcggtagcgccggtccaggtgcccggggtcgcggtgatggccttgaacgagccatcggcgttgacgctgtccttgaccgaggtcagggtcacgccagcggtgccgttcacttccgcgaacacgccggtctcgccgatcttggcgttgatcgcggtcaccagtgcttcacgcgaggccttgccggtggcagcggcgtcggcgccctgcttgaccgagacatcggcaatggcaacgccattgatctgcaggccgctggtgctgaaatcagcgttggtgcccgggtcggccagggccagcgcgttggtgtcgaacttggcgccgcccagggcgttggccttggcatcgatggtcttgtcgatggcgatggcctggccggcgttggcaccgacctggaacagctggctggagaacgaaccgtccagcagcttggtgccgttgaagtccgactgcttggcgacgcggtcgatttccgagaccagctgggtcacttcggcctgcagcgccttgcggtcgctggccgagttggtggcgttggaggcctgcaccgacagctcgcggacgcgctgcaggttgttgccgatttcggtcagcgaaccttcggcgacctgggccagcgagataccgtcgttggcattgcggatggcgacgtcggtaccgcggatctgcgtgccgaagcgctcggagatcgccaggccggcggcgtcgtccttggcgctgttgatgcgcgaaccggaggacaggcgctggatggtggtagccagcgagctgccgctggtgctcaggttacgctgagcattcaacgacatcgtattggtgttgatgacttgtgccatgaggagaggtccttgagcggttgcacgtgagttgggttagacgcccccgacgtgccccgggggcggctcatgtcagcgctgcaacaggctgagcacgttctgcggtacctggttggcctgggccagcatggccgtaccggcctgctgcaggatctgggtgcgggtcagttcggcggtttccttggcgaagtcggtatcgcggatgcggctgcgcgacgcggacaggtcctccgaggaggtctgcaggttggccaccaccgaggtgaagcggttctggatcgcgccgaggtcggcgcggacgctgttgaccgattccagggccttgtcgacgatcgacatcgccttctgtgcgccttcgacggtagtgacgttcaggtccttgacgaagctggccgctgcaccggtcagggtgccgccgttggtgctggtctcggtcaggcccaggccggcgagggtcgcggcggtggcgccggccggcggagtcgccgcgctgacacccagcgcgaaggtctggccatccttgaccgaggccaggctgacgacgccggcattgaccgaggcaaccacgccggtttcgcccagcttgttgttgatcgccgcggcggtggccgaggtgatcgattcgccggccttcaccgtgaagtcgctgatggtgaccgtggtggcggtgccgcccggcggggtcaccgagacctgcaggccggagtaggtggtgtcggccgtcgccttgtccaccgccagtgcggtgccggtataaccgttggcgaaagtggccgcgcccagcgaatcggccttggcgttgaccacgctgttgatggcgatggcctggccggcgttggcacccacctggaacagctggctggtgaagctgccgtccagcagcttggtgccgttgaagtcggcctgcttggcgacgcggtcgatctcgctgaccagctgggtcacttcagcctgcagggccttgcggtcgctggccgagttggtggcattggaggcctgcacacccagttcgcggatgcgctgcaggttgttgccgacttcgttcagcgaaccttcggcgacctgggccagcgagatgccgtcgttggcgttgcggatggccacgtccagaccgcggatctgggtggtgaagcgctcgctgatggccaggccggccgcgtcgtccttcgcgctgttgatgcgcaggccggacgagaggcgctggatggtggtggcgagcgagctgccgctggtgctcaggttgcgctgagcgttgagcgacatcgtattggtgttgattacctgtgccatggggtcgtctcctcttatatggaacccgttggtgaatgaaacgaagcgccgcctgtttttttgtgtggctgtgtgcttcgccgttgccaaatgaataacggcgctttgtcaacaacctttagccgtgaattccgttgaagccagaattcgttgcctgaagctgttttcccggggttttcagccctgttgccagggtggaagcggccccgggaggggcggtcgggcagggcctgaccagcgctgatgaaggtatcggcggggtcgggccgggcttgatggagaatcacggaaaatcgggcggcgacggccaggtggccgcgcagcggcgggcaggcgcgcaaacgaaaaaggccgcgatgcagggcatcgcggcctttcgggactgactcgggcggcgcgtcagcgcagcttgttgaacagcgacatcgactgcatctgcgagaagatcgtctgcgccgcctgcagcgcggtgctctgcagctggtactggctcagcgcatcggcgtaatccaggtcgcgcatctgcgacagcgtggtcttcagggtcacgccattggcctcgcgcatgtcggcggcattgtccagcgccttcaactgcgcaccgcctgcggcacgcgaatcgatcatccgctcggaagcgcgcgccacgtcgcgcagtgcgctctgcagctggttctgctgcgcagtcatctgcgcggtggtaccggtgtcggcacccagcgccgccaccaggttgtccatggtggagaagatgtcgcggctgctcgcggcctgtacgctgaagctgtcgcccgctgccggtgcgccggtgatgcgcaggcgcacaccgttcacttccagatcgtcgccggccttgtaggtgccggttccggtcacgttgcccgcaccgtccaccacctcgtattggttgccagtggtgaagcgcacgctgaagccctggccgttccagctgtcgctgccgtcgcgggtgatgttggtcagcacgccgttgccggtgttgccggccgcggcgctgccgtcgacgaagccatcgccggtgggaatgcgcatgaagatctcgctgccgggcagcgcgtccttcacgtaggtatccggaccgacttcgacctggcgctgggtctggtcgccacggtagaccactttgccgttgatcttggcaaacggcgggtcgccgtcgttggtgccaccgaacacgtagcggccggtgccatcatcggcgttggccagcgacagcaggccgtcgcggatctggttgacctcggtgatcagcgtcttcttgtccgccgcgctcagcgccggattgctggcctggatggtcagatcgttgacgcgtgccatcaggtcgttgacctgtgccagggtgttttcctgcacgcccaggcggttctgcacgttgccggcattgagcttcatgcggtccagtgcagccaggctgcggtcaaggccgaccgcggtgccggcggcaaccggatcgtccttggcgctgacgatcttgctgccggtggcgatctgctgctccaggtggctgagcttggcctgcttggccatcatcagcgacaccgactggttgaacatcatgctggtggagatgcggctgctcatcggcggacggctcccaggatggtctggaacatgctgtcggcggtcgagatcagctgcgaggcggcctggtaggcctgctgcaggcgcagcatgtccgccgcttcctcgtccaggttcacgccggagacttcgtcgcgggcttcctgcgccttgtcattgatcaccagctgcgcgtcgagcgagtactcggccgagcgggcggcggcgccgacctgggtggtcaggccacccagcgcgccgttcagtgtcaccgttccggcgttgaacgccttcgcgctttccaccttggccatcttcgacgcgttgctgttgtccgacgaaccggccggggtcggggtgatgttgaaggtatcgcccaccttcggtgcaccgtccagcacgaagctccagccgttggcgctgatggtctggccgggcgtgtaggtctgcggcggcccaccgtcgatggtgtaggtggtggccgaggtgaacacgatcgccgacggattgcgcaggttggcgttggtcgaatcggtgacggtgacaccgctcagcttgccggtaccggtgttggcggtggcggccgcgcccttcaccgctgcagcggcggcgatgcgcgacggatcggtgattgccacttccatgctgccggccacgcccgcggtcggctgcagcaggaagcggtcatttgcagccggcgtaccgccgacgaccagcttgacgccgttgatcaccagcggatcggcggcggtgccggtgccggtcagcgggatgctggcgccggtgtcggcgcggctggccttccagttggtgccatcgaactgcagcaccacgttctgcgcgtccagcttgcccaggtcgccgtaggttgcgctgaggctggcggtgccggtattgctgttgttgccggtgacgcgcgggttgccgatggtgaagaagtccccgcccagctggccatacaggtccacgccctggtggtgcgcctggttgaagctctcggccaggcccaccgccagcttgcccagttcagcctgggcaggggtcagcacggtgtcgcggaattccagcaggccaccgatctggccgccgaccgccttcgggtcgaggcggatggtgttgccctgggtctccagcgccaactgcaggcgctcgggctggtacgggtcggccacggtggtgaccttggtcgccgtggtacccaccaccagcgcgttgccgccggcggtgtagacattcatgatgccgccgtcctggatcaccgccgtgccaccggtgtagccgatcagctgggtgatcagctggtcgcggcggtcgagcagatcgggcgccgcggtggcgacgttggtgccgatggcgccgttgatctgcgcgatttcctgcgccaggcggttgacctcggtggcaccggccagcaggccgttgttgacctcgctgttgaggttgttcaagtgcgtgttgagctgcacgaagcggttggccaacgccttgccgccgtcgagcatgttctggcggtcggcggtgccggccgcgttggacgacaggccactgaccgaatcgaagaagttcgaccagacgccggccacattggtggccgcatcggagaacagcgcgttgacccggtcggccatgcccgaaagctgtttcaggcgcgccagttcaccgctgctgtcgagcaggcgcgagatcgccagctggtcggcagtgcggcggatgtcagtgatccgggtgccgttgccgaccgtgccatagccgtagttctgcgggtcggcggtagcgaagttgaccttctgccggctgtagccgggcgtattgaggttggccacgttgtggctggtggtcgccaacgcacgctggaaggcgagcagggcaccggtaccggtggaaagtacgctggacatggggttcctcaacgacgggtgatacccagcgccgcggtcgcggtgctggcgaaggtctggccaaggcgcgcgccggcgtcggtcacggccgctacggcacgctcgatggtcgggccgccggcgatcgcggcgatcttggccgcatagcgcgggtcggtggcatagccggcgcgctgcaggccacgggcgaagccctgcacgtcggtgccggcctgcagggcctgctggtagcgcgggctggtcttcagcaggcgcacgtagtcggcgaagctttcggccggcgagctgtaggcgcggaagctggcggtttcgttgcggcgtacgccatccacgtattcgtgggtgccggcttcaacgcgctggccgctccagccggtggccttgatgccgaacagattgtgcgaggtactgccgtcggactggcggatgtggcgcttgccccagccggtttccaacgcggcctgggcgaccagcgcacgggcatccacgcccagttccctggccgcgctctgcgcgtgctgccagatgctggcgacgaaaccttccggcgtgtgcggccccagctgggccacggcggtgcgggtagccatcgcatcggcttggctcatggccgtaccgcggttactggccgtcgccgaccactggtcgttgttggtggaccagtcctcgccctgcaggttgccgatgtacggatcctcggtgcccagcgagcggtgcaggctgctgctttcgcgaccggcgatcaggtccagtgcctgttccatcggtgccagcgcggcctgcgcgccgtgctgtgcgccggccgccatctgctgcagcatgcgcacggcctggctgccatcttccaacggcagcgacggtgccggcttgtccggcgcgttgagctggtatgcgcggctggccttggccggatccacgcgggtatccagcgcggggccgtcggcggcctggccggacagctggcggctgatcatgccggacaggcccagccccttgccgcgggtcatcgcctcggcgatcttctggtcgtacatgtcgcggaacatcttgttctcgccgggaaacagcgagtcgccgaaactggcatcacgcatgcttttgaccagcatctgtgcgaactggccttccagctggcgtgcgaccttgtcgatcttcgccgggtcgttctgctgcgccgggtgcaggtcgaatgcgggattgatgcgcatgtcagatcacctcgagctcggcactcaatgcgccggcctgcttcagggcttccaggatcgcgatcaggtcgcccggcgccgcgcccacggcgttcaccgcgtgcacgatctcgtccagggtggtgccgccgctgaacttgaacatgcggctgccgtcgttggtggcggtgatggtcgactgtgggctggccacggtacggccaccggacagggcattgggttggctgacgttggtgttctcctggatcgtcaccgtcagcgaaccatgcgagatcgcggcagggccgacccgcacctgctggccgatgaccacggtgccggtgcgggaattgaccacgaccttggccggggcgctgcccggggtcagctccagattctcgatgcgggccagcagaccgatgcgtgcgcccggatcggtcggcgcagtcacggccacggtcacgccgtcgaccgcacgcgcggcgccttcgccgaacgcgttgttgagtgcggcgaccatgcgcgaaacggtggtgaaatcgttgttgtgcaggttcagcgtgatgtcgccgccattggccagcgggtcgggcagggcacgctcgaccgtggcgccattgggaatgcggcccacgctcggtacgttcaccgaaacccgcgaaccatccttgccctgcgcaccaaagccgccgacgatcaggttgccctgcgcgatcgcatagatctggccgtcggcgccgcgcagcggggccatcagcagcgagccgccgcgcagcgagacggcgttgccgatcgacgacacggtgatgtcgatcggctggcccggcttggcgaacggcggcagctcggcatggatcgcgacggccgcaacattcttcagctgcggattgacgttggccggtacgttcacgcccagctcgccgagcaggttcttcaggctctgcacggtgaagggcgcctggctggtgcggtcgccgctgccatccaggccgaccaccaggccgtagcccaccagggcgttaccacgcacgccgccgacctgggccaggtccttgatgcgctcggcgctggccggggctgccacgaccagcagcatcagcgcgacgaacgacgccacgcggcgctgccaggaagaagaggggaggagtttcatggccatactcagaacggcgtcaggccggaattgaagaagcggctcagccagcccatcgcgttggactgcgcgaccgggccgcggccgccgtagacgatgcgggcttcggccacgcggctggaaggaatggtgttgtcctggctgatgtcgcccgggcgcacgatgccctgcacctgtaccagttcatcaccctggttcagtcgcaggttcttctgcccctgtaccaccaggttgccattgggcaggcgctggatcaccgtgacggtgacactgccctgcaggcggttgctctgcgcgctgttgcccttgccggtgaagtcacgcgcgcccttggccgtcgcactgaggatgtccttgccgcccagggtgaccggcgcaccgaggatggacggcgtgcccaggctcaggttggattccttgttggtggccgtgttggcgctggtctgcgcggtggtgttttccagcagggtgatggtcagcaggtcgccgacatcgcgtgcgcggcggtccgagtacagctgcagggtcgggccggcagcgtagatcgcaccggcggtcggcgcggcctgcggcggcatgatcggctggatcggtgccatcgccgcgtaggggcgcacgtcgccggcgatcacgcagccaccgagcagggcgaccacggcgcaggcgagggcagtgcgggtgaatctggaaatgggcgacatggcggtttcccggttgggccggtcagagcttgttgttgagatatccgagcatcgaatcggtggtggagattgccttggcgttcatttcgtaggcgcgctgggtttcgatcatcgacaccagctcttcgaccacattgacgttgctgccttccagcgcgccctgcaccacggtgccgaggccgttgagcccgggattgccgttctgtgccggaccggaagcggtggtttccaggaacaggttctcgccgcgtgcctgcaggccggccggattgacgaagtcggtcagggtcagcgcacccacttccactgacgccgcgccgtcggccatcttcacgctgatggtgccgtcggtaccgatggtcaccgactgcgcgccctcgggaatctggatgcccggctgcaccgggtagccgctgttggtgaccagctcgctgtcctggttgatcttgaacgagccatcacgggtgtaggccgagctgccgtcgggcatctgcacttcgaagaagccgcggccgttgaccatcacgtccagcgcacggccggtctgctgctggccaccctgctcgaaattcttggcggtggcgaccacgcgtacaccggtacccagctgcaggccggtcggcagctgggtctgcgccgacgaagagccgccgggctggcgtacctgctggtacagcaggtcctcgaagctggcacggtcctgcttgaagccggtggtgttggtgttggcgaggttgttggaaaccaccgacatgcgcatctgctgcgcatccagtccggttttcgcgatccacaatgcctggttcatcttcggtgtcctgtctgggtaaagccggccgcgcgatgcggcccttggtaacgggtgtgcaagcggtgtgccagcgccgcgcccgggcggcgccggaattccgtcagctgcccaggcgcagcaggttgttggcactgcgcgcgttgtcgtcgccgtgcttgatcacctgcacctgcatttcgtactggcgctgcagctggatcatctgcaccagtgcaccggcggcatcgacgttgctgccttccagctggccgctgtgcacggccgtgccctgtgccggtgcgaacggctgcagtgggtcggtgttgcggaacaggccatccaggccacgctcgaggcgctcgtccggcgcctgtaccaccttgatccggccgatctgcgccatggtctgcgggccttcgccctgcgggatgatcgagagcgtgccgtcggcaccgatttccatcgcctggtagggcggaatggcgatcgggttgttgttgtcatccagtaccggacggccgctggaggtcaccagctggccgttcggggtgaccgacaatgcagcgccgcgcgtgtacgcctcactgccgtcgctggactgcacggccagccaggtgccggtctgcagggacagatccagcggcttgccggtgatgtgctgcgagccgggcgtacggttgaagccggcgtcgacgtgcagcgcatccacccgcgaggcaaagcccgggcccttgatcgggaaggcttcggtgttggccagcgcttccttgaagccaggggtgtccgagttggcgaggttgtggctgagcgttccctgcgcctgcagggaggcgcgggcaccggtcatcgccacgtaaagagctttatccatgcggggagttccgtgacagggtcagcagctcatcaacggatgttgatgacggtctgggtgatctggtcctgcgtggtgatcatctgcgcgttggcctggaagttgcgctgcgcggtgatcatgttgaccagttgctcggtgagatcgacggtggacgcttccagcgagccggcctggatcttgccgaggttggaggtgtccggcatgccggtgcgcggcgtgcccgattcgaaggtctccacccacaggttgttgcccttcgattccaggccctgcgtgttgttgaaggtggtcagggcgacctggcccagtggcttgtcgtcgccgttggaatagcgggcgtagaccacgccggattcggacacggtcacttcgttgagcttgccggcggcatagccgtcctgctgggtattgcgcagggcgaacttctcgccgtactgggtggagccgctgatgtccagcgtcatgttcaactggccggcaccggtggtcggggtgaaggtgccgaggctgaccttgccgttggcaggtgcgaccagcttgccgctgttgtcgaaggtgaccggggtcggtgcgccggccggctggccatcgacgtaattgcgcacggtccattcgttggggttggcgcccttgacgaagtacgagacctggatgtggctcacgcccagcgagtcgtacacggtgatgccaccgctggagtggttgtagctgttcgaatcggccgggtcgaaggtcgccaccgtcggctgcttggcgttggccggcagggtgaagccaaccttcacttcgctggtctgcttcggcgggctgtcggtggtcagcagctgcaggtcgaccaggcggccggcatcaaagttggtgccatcggcattcggcgcgaacacctgcaggcgcgcaccctgcgggttgaccacgtagccggccgaatcggtctggaagttgccggcacgcgagtacacgcgcgaaccattcatgttcatggtgaagaagccttcaccggaaatggccatgtccaggctgcgcccggtctgctcgttgtggccctggatgaactgctgggcgacgttggaaacgcgcacgcccgagccggtctggttcttcgacaggccgtagctggtcgaagcgaacaggtcggcgaactccgcgcgcgactgcttgaagccggtagtgttgacgttggcgacgttgttggcggtgacgctcaggtcggtgttggcggcgttgatgccggacagcgagacattgaagcccatgggatgctcctggttgatgcggaaggtgcggctcagctgacgcggagcacgtagtcgatcggggccgtgcccaggcccttgaggttcaggtacaggccgtcggaaccaacggtcacgctctccaccggcgcctgtacgtaggtggacagcttggtgctcttgccggcggtgtcgacatggttggcgacgatggagtacttgcccggctccatgcgcttgccgttggcatccttgccgtcccactggaaggcggtttcgccggcagccttggcttccacgctcagcgaggtgaccttggcgccgttggcgtcggtgatgtccacggtgatgatgccggccgacggtgcagccaccgtgccttcgacattgccttccttctccagcaccagcttttccgacggcaccagcacctggtggccgaccagcgcagcgccacgcagcacctggtcgctggccatcgactcctggaagcccttcaccgtcttgttcagatcggtgatgccctgcacggtggacatctgcgccatctgcgcgaccatctgcgtgttgtccatcggcttcagcggatcctggtgctgcagctgctcggtcatcaggcgcaggaagtcggcctggtccagcgtgttcttctttttcgtggcgttgctgttgggggcgttcaggcccagcgcggaatagacgtcctggctggtctggttgttgacggcggtggtcatggcggtatccggtgctgcgggcctcagcggcccatggtcagggtggccagggccagttccttggcggtggtcaacatctccacgccggcctggtaattgcgcgaggtcgagatcaggttgaccatctgcgccaccggatcgacatcgggctggtagatgtagccatcggcgtcggccagcgggtggcccggctcgtagcgcttgatcggcgcggcctcgctctgggtgatctccttcaccttcaccgaggtgatgttgggatcgttcttgctggtgacggcctggaagatcggttccagcggcttgtacacggcgtcggcggaaccggcgacggtgtcggcattggagaggttggaggcgatggtgctcatgcgcaccgactgcgcctgcagcgcgtagccggcgatgtcgaagatcggcaggttgctcatggcttattgccccgtgatcgcggtcagcatggaacgcaccttgctctcgacgaagctgagcgaggcgcggtattccagtgcggcgcggccataggcggcacgctcggcatcggggtcgacggtgttgccgtccaggctgggctgcacgccttcgcgcgcgatctggaacgggttcaggccactactgatctcgtagtgctgctcatgggtggtggccatcaggccattggcatcctgcccctgggcgtggcgcagggcggcatcgaagtccaggtcctgggccttgtagccgggagtgtcggcattgccgaggttgctggcgatcagcttcatccgctgttcgcgcaacggcatggcctgggcgtggacgcccaggtagtcggtaatcaggttgcgcacggtgcactcccacgggaacgttgcccgggaagctgcaaggggtgtgccaaatggagagggggtcagatccccgcaggggctctgaccccgtggttgacgcgttgcgatgcggggtcggagcccgttccgggatccgacccctcggcgggccttacgccgccagcgccaccttgcgcaggcggtccagcacgaagtcggccagctcgtgcggcgagtacttggcgacgaacgcattggcgccgacgcgctcgaccatggcgttgttgaagacgcccgacagcgaggtgtgcagcagcacgtacaggccggccaggcccgggtggcgccggatttccgtcgtcagcgtgtagccatccatggccggcatctcgatgtccgagatgaccatggcatagcgctcggccgggttttcccccgaggcgtggacctgcagcaggtggtccagcgcctgcttgccgtcggaaagcagggtggcacccacgcccagctggtccagcacgctgcggatctgctggcgggccacgcgcgagtcgtccaccaccagcacctgcagctgcgggccgtcggcgggcatggccattgccgggtcgagtaccgcttctccgcgcacctgggcgatatcggccagcacgctctcaacgtcgatcacctggatcagctcgccctggaagcgggtcaccgcggtcaggtagctcgactcggcgcccagctccggtggcgggtggatgtcttccaccgcgatgttgacgatgcgttcgacgccactgaccaggaagccctggatcgagcggttgaattcggtgacgaccaggtagcccggcgaggtgtccgcgtccggttcgcgctcggggtggccgatcgccaggcccaggtccagtaccggcaccgagcggccgcgcacgtcggccacgccggagaactggctgggcaggccgggcacctggaacagctccgggcggcgcaggacttcctgcaccttgaagacattgacgccaaaaagctgacgtccgccgaggcggaacagcagcagcgccaggcggttgtggccggccagtcgggtccgctggtcgatccggttgagcaggtcatgggacatggctgctgtatcggcgtggtgggggcggaacttgagggcgctctgccgcccgcgcggcgcgcaccgcgtttgtagagtcgactgtcagtcgactgctcttcgatccgatcacgggaaacctcgcgcttcgcgcgaaagtcgactggcagtcgactctacccatccggtcgaatccccatcccggatccgatcaacgggacccggtctctggcacaccccttgcacgctgctgggccagatcccatcgacaggaggcgccatgcgccgggtcacatcgctgttcgccatcgcgctcgccctggccgcgccgtgggcgggcgccacggactggcaaccggtggccagcatccgcgcggccgcattgtcgacactgcctgccggcagtgaaggcgaggcgcaggtggccgatgcgctgcgcctgccgaaatgtggcagcgcgttgcaggtgcagcccaccgccaacaccacggtagaggtgagctgtcccgatgcgggcggctggcgcctgttcgtgccggtgaaagtgcggcgcaaccagaccgtgctggtgctcaaccgcggaatcggcactggagaaaccctcacggccgccgatatcaccactgcccagcgtgacgctgcccggattgccggcgcggtgctgtccgatcccaatgcggcgatcggccgcatcgcccgccgtccgttgcaggccggagccctgctgtcgaacaacgatctggtggtccagcgtctcatcaagcgaggagacaatgtagccttggtgtcgcgtcgcggctcggtcgaggtgcgcattgccggccgtgcgatgggtgatgccggtgagaacgagcgggtctcggtcgagaacctgtcctcgcggcggatcgtgcagggcacggtcgacgccgcaggtgacgtaatcgtggcgcgttgatttaccgcaaaatatccctaaagatcacggccctgcggccgttatcccttgtgaacggcaactccaggacaccccatgagccagaaaatcgacggcaacctgcaggtcccccaggcactgcgcagcgtgacgaccccggccagcaagcccggcgtcagcaccgatgcggcggcgcgcccggtcgaggcggccgacagcctgcgcctgaccggcgaggccaccaatctgcaggccatcgagcgtgagctgaccaccgccccggcgatcgacgcccagcgcgtggcggccgtgcgcgagtcactgcagaacggcacctacaagatcaatccggacgcgatcgcatcgcgcatgctcgatctggaccagcagctgcacggatgactgcggcgatgagcgagccgctgcagcgcctcgcccaggccctggacgttgagcgccaggccctggtcgagcacgacatgcacgccctgatccgggccaccggcgccaagctggaagcgctgcgtgcgctggaaggcgcgccgccggtgggcgagggcgaacagctgcaggaactggccgagcgcaaccgcgccaacggcgtgctgctgtcgcgccgtcgccgcgaggtgaactgggcgctgcgccagctcggccgtaccgaagatgcctcggcctacgatgccaagggccagtcgcacacggtcagcatcggccggccactcgccgtcgcctgacgcgacggcggtcgcacaccccctcccggtgggctgaagcccgctgcatgaccgcgtatattgggcgcctgttcgaacgccccgagtcgccgtgtccgctgccaacgccctggttaccgccccccttccgccgcagccggtgctgcaggccctgcttgagcgcctgcgcgaaggcctgctgctgttcactgaagacgggcaggtggccctggccaacccggccgcgcagaacctgctggccagtggctcggacggcggattgccgccgccgcagcggctgcgcgagctgctcccccctgatgcactggagcaggcccgccagcatggccactggaatggcagcctgccgctgggcgagggcgtggtcatcgcccacctgtaccaccatggtccggtcggcgaagggcatttccttgcgttgttccgccacatcgaagggcaggaagactacgagcgcgaactgcagcagcgccacgccgagctgcgccaggcctacctgcgcctcaatggcacccaggaaaagctgctgcagtcggagaagatggcctcgatcggccagctcgccgccggcgtcgcgcacgagatcaacaacccgatcggttacgtgcactccaacctgggcagcctgcaggagtacctgcgcagcctgttcaccgtgatcgaagcctacgagcgcgccctgcgcgcgccggacccgaaggcactgattccggaaatcgatgacatccgtgaccgcctggacatcgacttcatcagccgcgacctgccgcagctgatggcggaatcgcgcgaaggcatcgagcgcgttacccgcatcgtgcgcgacctgaaggacttctcgtattccggtcgcgacgaatcgtggaagctggtcgacctgcacgcgggcctggaatcgaccatcaacatcatctggaacgaactcaagtacaaggtcaccctggtacgcgaattcggccagttgccgctggtggagtgcctgccgtcggagttgaaccaggtctacatgaacctgctgctcaacgctggccatgccatcgccgagcgcggcacgatcaccgtgcgcaccggcgttgatggcgatcacgtgtgggttgaattcgaagacaccggcggcggcatctcgccggaactgcgccagcgcattttcgatccgttcttcaccaccaagccggtcggcagtggcaccggtctgggcctgtcgatctcttacagcatcatcaacaagcatcacggccgcatcgacctggacagcaccccgggcgtgggctcgcgcttccgcgtggtgctgccggtgaagcagccgcgctgaccgcttccgaagtggaaccggacacccagagcagccggccagcggccggctctaccggggcctatcgatggtagtgccggccgctggccggcagcttcattgaacccggccacccagagcagccggccagcggccggctctaccggggcctatcgatggtagtgccggccgctggccggcaacctcattgaagccgggcacccaaggcagccggccagcggccggctctacccgatcatcaccgcagcggccgatcctcgccaccatccccggtttccaccggtgccgggccggcattgctgcggcgctgttcttcgtacgtgcggaacgcctggtggatgtgcttgcgcagctcgtcgtcgttccacggcttggtcaggaagcgatagatcgcgccgcggttgatcgcatcggtcaccgtgttcagatcggtgtagcccgacagcaccaggcggatcgtatccgggtacagcatcttcacccgccccaggaactcggtgccgctcatgtcgctcatgcgctggtcggacaggatcacctgcacgtcgttgatcgccagcagatcaaaggcgtcacgcacgttgccagcggccaggatgcggtagccgtcgcggcggaacaggcgcaccagcgagcgcagcacgttctcctcgtcatccagcagcagcaacgtgcggtccgggcgcgtttcggcgaaggcttccgggcgcaggtagcggcggcgcagggtcatgccggcggcatcggccgacatcggctcgccgaacaggtagccctggaacacatcgcagtcgttgcggcgcaggaagcccagttgggcctgcgattccacgccgttggcaatcacggtcatgcccagctggtggcccatggcaatgatcgcgcgggcaatggctgcttcgcgattgccagccggtgcgctcttgatgaagctgcggtcgatcttcagcttgtccaccgggtagcgcaccagcgcgctgaggctggaatcgccggtgccgaagttgtccaggctcaggctgatgccttcgttgcgcaggttggccagcgtttcatggacgaaattgacgttgttggtcagcgcgctctcgttgatctccagcgtcagcatgtgcgccggcacgcccgcggcctgcagcagggacatcacctcggcgaagaagttcggccgcagcagctgcagggtggacacgttcaccgcgatggtgaagtcatcaaagccctggtcgcgccacaaccgcgcctgcttcaatgcgccttccagcacccaggtgccgatctgcacgatgatgcccaggcgctcggcggtgcgcatgaagcgctccggcaccagcatgcccagggtcggcgactgccagcgcagcagcgcttccatgccgaccacgtggccgtcgcgggcgctcaccagcggctggtaacgcagcttcagctcgccattgggaatggcatcgacgatctggcgcgcgatgatgctctcgctgtgcgcgctcggcggggtatccacggcatggatgcgcacggcattgccgccttcgcgggcggcctggtacagcgcatcttcggcatggtcgagcaggcgcgaggcgctgctggcatgttccgggcacaggctcacgcccagcttgccggtcatgaacagcgtgtatggaagcaccgacagcggcagttccatctgctggcggatctcttcagcgaagtcctccggcagcggcaggtccgcggtgcggggcaccgcgatcaggaactcgtcgctgccatgccgccacagcttgccacgcccgcgcaggtaggactgcaggcgctgcgccaccagtaccagcgcctgatcgcccacttcggcactcatgttctcgttgaccgatgcgaagtggtcgatgtccacgtgcatcagcatcagcgcaatgccgccggaggccgcctcggcaaccatcgcctgcagctcggggttgccggcgccaaggcggtcgggggcatcatcgatgctgaccgggggcaggttgggattccacataggctcagtattccggtgaatcgacggcggccatgctggtcgcctggtaggggaggtggacgtcgatcagggtgccctcgccatgcgcggattcgatccgcacgtggccaccgacgctctgcgcgcgctcgcgcatcacgatcaggccgaggccgcgcgggccgtccggatcgaagccttcaccatcatcgcggatctgcaggtgcaggccacgctggctgacgtcgcgcagctgcagcaggacctggctggcgcgcgcatggcgcagcgcattggtcaggctttcctgtgcgatgcggaagcaggcctgttcgatgctgttgtcggggcggtgcggcagcggctcgatctcggccagcagctccaccggcgaagagcggaacagcacccgcgcctgccagctcagcgccgcctccaggcccagtgcatccagctgcggcgggcgcagcagggtggagatgtcgcgcagcttggccacggtggtgtcggccaggctgacgatctgcgccaggtcctcgccacgacgcttcggatcgtcctcatcctgcgccgcatgcgccgacagcttgatcgcggtaatggcctggccgatgtcatcgtgcaggtcgcgcgagatcgcgcgacgctcgtcctcctgcagcgagaacagccgcccggccatcgcctgcagctcgcgattgctggtttccagcgccctgcgggtgcgttcggaatcgctcaggtcgcgtacgatcagcagcttgcagtcacgaccgccgtagcgcacttcgcccaccgccaggccggcatggaagctgcggccgtccgcacgctgcatggccaccacgctgctgtggcccggccccaggtgtggctggccggcgcgcagctggctgcgcacccgtggcaggtcggcggcagcgaccagtgccgacagcggctcgcccagcagggtgtggctgccgtagccgaacaggccggcggcccaggcgttggcgtacagcacgtgctcgtcggagaggatcaccacgccgtcgggcagtacccgcaccagctcgcggaactgttcctcgcgctcgcgcagcaggcgccgcgactgctcgcgctcggtcacgtcctgcagcgtgcccagcacgcggctgcggccggcttcgtcgataccgctggccgcccgcaggtgcaccatcaatgcacggccgtccatcgacagcagcggcagcagcacgtccacctgtaccggctcgccggagcacagttcggccagcagctgttcggtctgggtggcggtggccgggtcggccggcaccagcagctcatcgaagcggtgccagcgccgggcctcgggcgggcggcggccgagcaggcgatagacctggttggaatagcggcccagcccggtggacgggtccagttcccaggcgccgatgcgggccagctcatgggcttcctccacccgggccaatgcctggtcgcggcgcagctgggccagatcctcggcggtgcggtcgatggcgatcagcaggcgggcgttgtggccgtcgtagctgatggcgttggagcgcagctccatctgccgcagcgcgccatcgcgcagctgcagctgagcgcgcaggatgcacagctcctcgggcgcctcgcggatcgcctccagcttggtctgcagggcctggtcctggcccggcggccacaaggcgtcgatggtctgttccagcagctcgtcgcggtcccagccgaaggcgctgcaggcggctgggttggcatcgaggatcgccagcgtgtccaggtcgtagacgaggatcggcccggggttgccctcgaacatctgccgcaggcgcagctcggaggcctgctggcgcgcatgggtatgcagcacgtgttcggccagcgggcgcagcagcagatagagcaggcccgcgctggccagcgcgaagaacgagcccttcaggccctgccacagggccgcctgctgcggatcgggcaccagcgcctgcaccacgctgtcggtggagatcatccaggccagcgccatcaccaggtagctcagcaccacccggcgccggtcacggctcagcgcctgcgccatccgcgggtcgggaactggggcgttgccggtcggttctgcgggcatggacggggcgggtgacaggggcgccggtcatcttaccccgcagcgtgccgtgaccactcaattatccgccgcaggcgccgttaaccactgcgtgccccgctgacgggcgtgtcatccggagcaagatcgcgtggaccaagggatcatcgccagcctgctgcagcacccgcttgcgtcggcgctggtcatcgtcgaccgtgccgggcgcccgctggcggccaatccggccgcgcgcgagcatggcctgccggccaccgtggcggcctatgcgccgatgctggaagatctgcgcctgatggccgccgatggtggcatcgttgcctgcacgctgccgggcggcccgcgggggcactacgacgggcacctgcgtgcggtgcacgacggtgccggcaacctgctggcgttcaccctgagcattcccgagccggtgccggtcgatgcgggcgggcgctgggagctggcactggacagcgccggccacagcctgtgggactgggatatccccagtgaccgggtggcgcgcacgccggcgctgggcgacgagaccgccactgaattgctgtctcgcgtgcacggcgaggacatcgcccaggtgcgcgccgcgctcgacgagcacctgcgcgggcacagcgagcagtacagcgcacagttccgtttccgccaggccgatggccagtggcgttgggtgctcgatcgcggccgcgtggtcgctcgcaccgccgatggccagcccctgcgcatggtcggcacgcataccgatatcgagcagcagaagcagctcgaatcgctgctgcaggaacagcagctgcacctgagcgaggcccagcgcatcgccagcatgggcagctggtcgtttgatcccaacagcgggcatttctggtggtcgccggaactgcgttcgcttctggcactggagcagggcgccgttccgggccagcggcgctggctgaagcagctgcatccacgctcccgcggcgcgctgcgcgcggcatggcggcggttgtggcgcgatggccgcgctgccaacctcgagctggagctgacccgcggccatgagccttcgcagcacctgcggctatggatgcagccgctgctggacatggacgggcaacccaagcgcctgctcggccaggtacagaacatcaccgaacagcaccagaccgatgcgttgatccgctggcgcaccgaactgctgaaccgggtctccgcgctgggccgcatcggcggctgcgagatcgaagtgcagacccgcagcatgcaatggaccgaggagtgctaccgcatccatggcctgcgcaaggaaccgatcaccctcgaccaggcgctggcgctgtacacggaggactcgcgcaacgcgttcgaggcggcgctcgcccgtatcgccaacggcggcctgcccgagcagctggacctgtgcttctaccgccagtccggcctgcgcgtctgggtgcaggtgctgatcgaactggaccgccgtgacggcctgccgccgcggttcgttgtcctgttccgtgacatcacccgcgagcgcgaagccaacgagcgcatcgaactgctggcccactacgacctgctgaccggcctgcccaaccgcgtactgctcggcgaacagaccgccgaagccatcgaggaagcacgcgaccgcggttcctcgctggccatgctgttcatcgacctggacggcttcaagaccatcaacgacagcttcggccacgccaccggcgatgcgctgctgaaggccgcagccacccgcctgcaccagaacctgcgcaacaacgacctgttcggccgcttcagtggcgatgagttcatcgtggtgctgcgcgacctggccgagccggaagatgccggtcatgtcgcccgcaagctgattgcctcgctggctgagccgctgcgccgtggcgagaccacgttgaaagtcggcgccagcgtcggcatcgcgatgctgggcgatgcgcagaccgatttcgactcactgctgcgcgcggccgacgccgcgatgtatgcggccaaggaagccgggcgcaacacctaccagtactacagccaggacgccctggcccgcatccagcgccggctggacgtcgagcatgccctgcatggggcgatcgagcgcgacgagttcagcctggcctaccagccgctgctgcacgcccaccacggcgagccaccggcgatcgaggcactgttgcgctggcaccgccccggcatcggctactgcagcccggccgagttcattcccattgccgaaaagtgcggcgagatcgtgcgcatcggcgactgggtgctgaacgaggcctgccgccaggcgaccgcctgggaccgtgccggactgcactttgatcgcatcgcggtcaacgtgtcggcggtgcagctgcgtgatcgcggcttcgccgagcgcgtgatcgagatctgccatgcccatggctggccgccgcaacggctggaactggagctgaccgagtcggcgctgatccgtgataccgacatcctgcgccattgcttcgacgtgctggaacggcacggcgtgccgctggcggtggatgacttcggcactggcttctccaacctcaattacctcaaccgcttcccggtggggcgcctgaagatcgaccgcagtttcgtgcagggcatgctgcatgattcgggcacggccgaagtcacccaggccatcgtccacctgggccacgcgctgggcatgaaggtggtggccgaaggcgtggaaacccaccaggaagaagacatgctgcgccgccagggctgcgacgagatccagggctacctgtactcgcgcccgctcagcccgcgtgatctggcgcagtggctgcgccagcagcgcccggcgccgatgcgcaccgacgccagcggcgaagcggtgctggtgcgctgaggatctgcgctggcagatgccggcgcggtgtagcctgactctggtgcgcccagctctggtgggtgccgaccgttggccggcacggatgccctgacgctcgcgatcatccacgcatggcgtggaactacctgggaaactccgccttcaactgcatgcgcagggcctcgacgatggccgcatagcgtcgcttctggaccagatagctggccaggaacagcggcagcaccagcagcatcggtgccaccatcgggcgcatcgccaccagcggcaacagcagcagcgacaggattgccacgaaccagctgcacaggccgatcacccgcacctcgtgccgtcgcgcgttgagaacgatgcgtccacgcatcaccgggaagtagcgcaggccgaagctcggtgcgaagctctcgcggaacgccatgctgccatcgggcagcgcatggaaggccagttgcagccatctgtcctgcggcaggtcacgttccaggctgcccagcgagagccgggcctgcatggccggtgacgccgcgatgcgttcgttgaacagggtgatgccccagctgaaatagccggccacccaggtcatcagaaggacggcttcgatgaggagcactgcgatcagggcgatggccatcggtcttccatgaatgggaccggtggatcatgccatgcgggacggcccatccacgcaggacgtggatctacttcagggcttcgccatccaggcccaggtcccatgccaggcccagcagttcatcgtcggctcgggagggggtggggcgcgcatcggccagctgctgcagttcgagcagttcctcgcgggccacgtcttccagccgctgcagctgctcacgcacgctcgcattgcgcgggcgctcggtgtcggtgagggcgggcagggcgcggatcagggtcatggtgcgcgtacaggatgcatccaatggcgggttacaggcaaaggccccgggcgaaccggggccttgcgggctgccggcgagggcagcggacatcaggatcagaacagctcgacggtgccggcgcccatgctctgctgggcgacgggcttgtgcggcgggcgttcccattcgctgcgcagctcgcgcaggcgattgccggtccgctgcagggcgctggcgatctcttcgtcgaacacgccgccattgcggtgcagcagctcctgcagggccaccgcttcgcggttgatggcagtcaggcggtccaggtgggtgtgcacgccgcccagcgcctgggtggcgatgtcttcgaactgcagggcacgcacggcttcggccacgctgccatcgatcgcacgggcgcactcggacacttcgcgcatgccgtcgcccagcgaggcgttgatctgcgcgacgttgtcgagcatcgctgctgcttcctgacgggcttcgcgggagcggtccatatcgcgcgaggccatgtgcgaaaccgtctcgcgcaccttggcgatggcgtccttggagctgtgcgccagcttgcggatctgctcgttgaaggtggtcgagcgctcggacaggttgcgcacttcgtcggcgaccacggcgaagccacgaccggcttcaccggcgcgcgccgcttcgatggccgcgttcagcgccagaaggttggtctggtcggcgatcgacttgacgtcttccagcagcgcgaagatgccatccaggtgctgcgccatctggtcgatgtgctgcacggtggtgctgctctggccgctcacctgttccagcgcttccaccagctgttccatgcgatggctggcgtgctgggcgaaacgggcgacgtcgaggccggcattgccttcatcaccggcgcggtcgacgatgcgcgacagggcctggctctgctggcgcgacttgcggttcatggcatcgaagctgccgcccaggctggagacggcctggcggatcaggtcacgggcgcgttccacttcgccacgcgaaccgtcgatctcgttgccgacgaagttgcgcagctcggtcagcagctggtcctgttcgcgcaggacacgggcgtgctcgggggaacgatgtgcctgtgcgcgggtggtccaccacgcaaagccgagccagctcagcgtcatcgtggtcaggatcgcccagcgcagggcggccggccattcgaaaccgatggcgaaggggagcagcagggtcagagccaggggggcggccagacggatgaaaatgcgtgagtacatggacgttctcgggaggtgcacggaggatgtatcggccgtaccccctttctctttaacgtcgatgtgcctcgaagtgcattctgaatgcgccggttttccggcgccttggcggcctcggggtcagagccctttccgtgccggaaagggatccgaccccttgggcaggcgcaacagggtcggatcccttttccatggaaaagggctctgaccccacaccctcaggccagcaggcggtccacggcctcgatcatcgccttgcggctgaacaggaagtcccagtagctgccgcccagctggcgccacaacaccgccgaacgcaccgcggccagcagcagggcacggatctccgccaccacgccggcctggcccaggtagtgcgggttgccctgcaccatcacccgcggtttcaggtggctgatggtgtcggcatacaggccgccgaggttggccagtacgtccgggtggccactgtcgcccagttcggtggcctggcgatgggcgcgctcgatgcccgaggcgaccttgttcacggtcgccccatcctgcacgaagcggcgctccagctgcagcaccgacagggccagcttgggcaggatcgggtcctggccctggctgcggaagtagttgtgcagcaggcgcaggccggacttcagtgcatgacggtcaccgaacaccgcctgcggcgaggacgcatcgacgcggaacacgctgtccacggcggtgcgcacggcggcggcgtcggaatggccggtatcggcgatgcggcgcacctgctgcagggcctgggcaatgccggccagggccaggacgcggtcgtcgacagtgaaactcatgcagcgattacctcaaaaggggagggggtggtgcgcaggcgttgttccagcggcgcatcggtggcggcgatcaccgcgccgcccaggcacacatcaccgtcatacagcaccagcgattgaccgggggtaacggcacgctgcgggcgcgcaaaggtgaccagcacgctgccatcgtccagcacctcgaccgtacacggctcgtcgggctggcggtagcgggtctgggcggtgcattcgaagcgccgtgccggcggtgagccggcgatccagtgcgcggtttccgaacgcaggcggtcggacagcatccacttgctgtcgcggtcctggtccacgtacagcacgttgctggccacatccttgccaaccacgtaccacggcgcggccgggcggccacgcacgccgccgatgttcaggccctcgcgctggcccagggtgaaatagaacacgcccgggtgttcggcaatcacgctgccgtcggccgggtcgaggatctggccgggcttggccggcaggtagcggccgaggaattcgcggaagtcgcgctcgccgatgaaacagatgccggtggagtccttcttggcgtgggtcggcaggccgacgtcgcgcgcgatccggcgcaggtcgctcttttccaggtcgccgatcgggaacagggtggctgccagctgttcctggcccagttgatgcaggaagtagctctggtccttggatcgatcggcgccgcgcagcagcagccactggtggccgcgctgggccacccgtgcgtaatggccggtggcgatgcgctcggcgcccagctcgcgggcggcgtccaggaaatgcttgaacttcacttcacggttgcacagcacgtccgggttcggggtgcggccggccgcgtactcggccaggaagtgctcgaacacgccctgccagtactcgctggagaagtcccggaagtggaacgggatgcccagcaggccgcacacggccaccgcgtcgcgacggtcatcctcggcacggcaatcaccgctgccatcgtcggcccagttctgcatgaacaggccggccacggcctcgccctgctgtaccaggcgccaggcggcgaccgaggaatcgacgccgccggagacgcccaccatcacacgcggagtgctcatgcgacctcccgaaccagcgaaagcgggtggcgctggccacccaggtaatccgccaccacctgccacaccagcgggctgcgctggcgctcgccggcggcctgcagctcggccggtgtcagccacagcgcgcggtcgatgccggtgtccagcggctgcgccggatcgtgcgaaaccgggcgcgccgcgtagcagaagcgcaggaaggccgtgccgtcgccggcagtccactggtagcagccaatgaagtgggtcagctgcaccgtccagccggtttcctcgcgggtctcgcgcagggcggcctcggccaggctttcgcccggctcgaggtggccggccggctggttcagcacctggcggccgtcaatggtctcctcgaccagcagcacgcggccgccgtcgatcaccacggtggcaacggtggcgtgcggtgcccagcgcgggtccggcgtggcgttcaactcagaactcgtccttcttggtcagttccagctccatcgcgtcggcggtgcggatggccgcatcgatggcgtcgctgagctggtcggcggtggcatcggcgtcgatcttcaccacgaacatggcagtggtgtcctgctttacccagccgcccatcttggcgtcctgcgaatcttccagcaggcggttggccacggccaccgggaactgcttggtcttggcgctgtaggccggcgaccagatctcgcggatgttgtggctgccgaagtcttccaccgccgagcgcacgtagaccatctgggtgcggtcaccctcgacgtcgaagaccatgcggtagtcgccatcctcgtcgacctcgtaggtgtaacccagcttgtccaggtggcgggccacggacttgtcggcctggggcgcggcggtggcagcaccggcagcggccagggtgatcagcagggcgggcagaagggtccttttcatgaagatcctgtgaagcagtgttgaaagaagctgcaattgtgacgttgggcgtgcgtgccgtccaatctgcggctggccgacgcaggcgcggtgcaacctctataatggatggatgccccatgagtcctcccccgattcccatcacgagcacggcgttgccgtggagcccgcgcgcccggaagtggcgccgccgccgttctaccaggtgatgctgctcaacgacgactacaccccgatggatttcgtggtggatgtactgcagcagttcttcagcatggacctggacaaggccacgcaggtgatgctgcacgtccatacccgcggccgcggcgtctgcggcgtgttcacccgcgaggtcgccgagaccaaggttgcccaggtcaacgagtattcgcggatgaaccagcacccgctgctgtgcacgatggaaagggcctgaccggctgccgatcctcgtccgggtacatcgactccggacacggcgtgcccaccaaggtgggcacctaccaaggcagaaacctgtagagccgagcccatgctcggctgcttttcgtcccggcgcaatgatcccggatggagtgcgcccaccacgcgcggaggtcacgcctccgccaacgcctccagcgccatgcgtgccactgcctcgtcgacctcggcggggtcgccgtcgccccggaaccacaccgctgacagccccgcgctggccgcgatccagcgcagcaggcgcgtgcgttccaggccggccagtgcgcttacctgttgcagccgggcggcaaaccgctcgggccgggtggccacatggatgcccgggccacagaggtccgggttgctgaacatcgtcgtgtagtcgaacgcgcggtcgcccagcagccgcttcgggtcgatcgccagccagccacgcgtgccgaaatccagcacgttgtcgtggtgcaggtcgccgtgcagcggccggatctcacgttcttcctgcaacacccgctccgccagtgatctgcactgttccagcagtggcggcagcgcggcccttggctgcagcaggtcggcgaaccatgtacgcaggcagaccagttccgctggcggcgcgctccgtggccggtgcagctgccgcaggacctggcacaggatcgtggtacacgcatcatcgtcgccctcgatcgaacgttgccgcagcgaatcgccgccggcacgctcgatcaggatcgccggcccctcgtgggccagcaggcgggcggcaccatcgccgtcccaccagcgcagcaggcgatggccgttctgctcctcggtttcgctgctgaccttcagcatcgccggttcgccgtcggcggtcagcaccggccagagctgggcgtggggcgtctcgatggccgcgccatcacgccgcaatcgccagcggctcaggtagggttcgctcatgctgggtgggctgtcctggagtgaatgaagatcaagcgatctgcactgctaacgccatctgaacgcagcaatccgctagggtgatggaaatcgcgtagtcaggccgcatattgtccccatctgccgccggagtaatccatgttcagcaaagacctcgaacacaccatcggccagtgctacaagcgcgcccgtgaggcccggcatgaattcatgacggtcgaacacctgctgttggcactgctcgacaacccgtccgcccaggccgtactgaaggcctgtggtgccgacgccgaacgcctgcgccaggagctggagcaggccatcgaggcttccgtgtcccgcctggccgaagatgacggccgtgatacccagccgaccctgggcttccagcgcgtgctgcagcgggccgtgtaccacgtgcagtcctcgggcaagaaggaggtcaccggcgccaacgtgctggtcgccatcttcggcgaaaaggactcccatgccgtctattacctcaaccagcaggacgtgacccgtctggacgtggtcaattacctgtcccatggcatcgccaagctgggcgaggaaggcgagcagccgtcctcctcctccgatggcgaaggccgcatcgaaggcggggagggcgagccgaagggtgatgccctgaccgagttcgccagcaacctcaacgaacaggcgcggtccggccgcatcgatccgctggtcggccgtgccgacgagatcgagcgcaccatccaggtcctgtgccgccgccgcaagaacaacccgctgtacgtgggcgaggccggcgtgggcaagaccgcgattgccgagggcctggcccgccgcatcgtcgagggctcggtgcccgacgtgctggccgacgcggtgatctactcgctcgacctgggcgcgctggtggctggcaccaagtaccgcggcgacttcgagaagcgcctgaagagcgtgctgaccgcactgaagaaggtccccaatgcggtgctcttcatcgacgagatccataccatcatcggtgccggttcggcctcgggtggcaccatggatgcgtccaacctgatcaagccggcgctggcctccggcgagctgcgctgcatcggctcgaccaccttccaggagtaccgcggcatcttcgagaaggaccgggcgctggcccgccgcttccagaagatcgacatcgtcgagccgaccgtgggcgagacctacgagatcctgcagggcctgaagtccaagtacgagctgcaccacggcgtgacctattcggacgaagcgctgcaggcggcggtggacctgtcggtgaagcacatcggcgaccgcctgcttccggacaaggccatcgacgtgatcgacgaggccggtgcccgccagcggctgctgccggaaggccagcgcaaggagctgatcgacgtcgaggaagtggaggcgatcgtggccaagatggcgcgcatcccgaccaagcaggtcagcgccaccgacaaggatgtgctgcagcatctggagcgcaacctaaagatggtgatcttcggccaggacccggccatcgagacgctgtcctcggcgatcaagctggcccgctcgggcctgggcaatccggaaaagccgatcggcaacttcctgttcgccggcccgaccggtgtcggcaagaccgaggtgaccaagcagctggcgctgcagctgggcatcgagctggtccgcttcgacatgtccgagtacatggagccgcattcgatcagccgcctgatcggtgcccctccgggctatgtcggcttcgaccagggcggcctgctgaccgaaaagatcgtcaagacgccgcactgcgtgctgctgctggacgaaatcgaaaaggcgcacccggacatcttcaacatcctgttgcaggtgatggaccgcggcgtgctgaccgataccaacgggcgtgaggccaacttcaagaacgtggtgctggtgatgaccaccaatgccggcgcggcgcaggcctcgcggcgctcgatcggcttcaccaagcaggaccatgccaccgacgcgatggagaccatccgccgcagcttcaccccggaattccgcaaccgactcgatgcggtggtgcagttccaggcgctgggcttcgagcacatcctgcgcgtggtcgacaagttcctgatcgagctggagatgctgctgcaggacaagcacgtcagcctgtcggccacgccgaccgcacgcgactggctggcccaccacggcttcgacccgctgatgggtgcgcgcccgatggcccgcgtgatccaggacaagatcaagcgtcctctggccgacgagctgctgttcggcaaactggtcaacggcggcaaggtgaacatcgatgtccgcgacgacgagctggtcgtagagacccaggccgagccggagcgcctgctgccggtcacggtggagtgagctgacgccgggcctggcccggcggacctgaaatgacaagggcggcttcggccgcccttgtcatatgcgccatcaacggccgcgctggcgggccttcttctggaaggtggcttcgtcgatcggttcgatctgcgccacccggcagtggtcggcatcggtgcgcagctggctgcggccggcgctgcacagcaggccctgctggccttcggtgatgaagctcagtttccgcgagtagccggcagtggagcagtcgttctggaagtgcacgacatagtggtcctggccattgcgcagcaggatgttccgcgaaacgccggcgcgcacgatctgctggtcgctgcccagctggatgcagtcactggccgtggaagggggctcggcggcgcgcacaggcgatgcgctggcggacgtggcaacggcgacgagcagggcggtcaacgtgagcatgttcatggcgaggcaggggaatggcgatccggactggatcgggtcccacgatgccgccacggatgaagatgcgaatctgccgcaagcagggctgaccgacgccacggtgcgttcggtcacgatgacctccggcagggccggattgcaggcatgacaaaaggccagcaaccagggctggccttgtcgaagtggcgcaacgcgccgaccgcttacttcatgcggtaggtgatacgacccttggtcaggtcgtacggggtcatttcaaccttgacccggtcaccggtgaggatgcggatgtagttcttgcgcatgcggccggaaatgtgggcgatgatttcgtgcccattttccaggcgaacgcggaaagtggtgttcggcagcgtctcgctgacggtgccctcgaactcgatggaatcgtctttcgacatgtagtcctgtgcggttcagaaaacggccacgctgggcctaaggcgcagtattttacgcgtgaccggcccagcttgcaaagtttgtgttaacccccggccaaacgctgtgccggcaggcgtccgaccgcctgcgtccaggggccttcacggccgtcatggcgcaccgcgtggcggacgtgctgcaggaacgccgcgcgcggcaggtgctcggcgcccatccgcagcaggtgcggattctccacctgggcatcgatcagcgcccagccccagccgtgaagcgtggatgccagcgcggccagggcgatcttggagccgccgctggcgccactgaacatgctctcgccgaagaacatcgtcccgatggccaccccgtagatgccgccgaccagcgtctgccggtcccagacctcgaaggagtgggcaaagccgaggtcatgcagctggctgtaggcctcgaccatgtcggggctgatccaggtgccgtcctggccgggccgcggtgccgccgcacaggcgcgcatcacccggctgaaggcggtgtcggcggtgacctcccatgtgctgccgcgcaactggcgccggaagcggctggacagatgcacgccatcggtacggaacaccatgcgcgggtcgggcgaccaccacaggatcggctcgccctcgctgaaccatggaaagatgccgcccgcatacgcgttgagcaggcgcgccgggtgcaggtcgccgcccacggcgagcaggccgtcgggctggcgcagggcggtctcggccggcgggaagggggcgtccggcgcgtcggccaggcgccagggcagctggcgggtcatgccggcattgtattcgtcgcggccccgcgcgaatgccgcggtagatgccaaccttggttggcgggtcacccgtccgcgcgaaatgggctgtgccccagcagctcctgttggtagcgccgcacatcccgccgctcctgccggcaccactcctgcaacgcctcggcgaactccgcatcagccacccagtgccggctgcgcaccagtgtaggcaggaagccgcgcgccagcttgtgctcgccctgtgcgccgggttcgaaacggctcaggccttcgcgcaggcagtactcgatgccctggtagtaacaggcttcgaagtgcaggccgggcagggtggcgccgccccagtagcggccgtacagcgtgtcaccgccgcgcaggcagagcgcgccggcaatcggctggccttcctgctcggccaggaacagtaccagcccgcgtcccaatgaaatggccagatggcgcaggaagggctccgtcagcgccggggcattgccgtactcaaggaaggtctgcaggtagaagcggtacatcgcctgcaggtcggcgcgactggcctcgtcgccgtgcaccacgcggaaggtgatgccctggcgggtgaccttggcccgttcctggcggatgttcttgcggtgcttgtggtccatcgcggcgaggaactgctcgaacgttgcccactcgccggggttctgccactggaactgcacatcctcacgcagcagccagtcctcgccgaacagcgcttcgtctgctggggtgtggaagttgatatgggccgatgacacctccagtgccggcagcgcatcacgcaacaccgacagcaacgcggcgcgatctgaatcgtgacgggccagcaggcgcggcccggtgaccggcgagtacggtaccgcgcccagccacttcgggtagtagtcgcggccatggcgggcataggcgttggcccaggcatggtcaaacacgaattcaccgtgggagttggtcttcaggtagcccggaattgcgccgatcaggcgctcgccctcccacagcgtgaagtgccggggctgccagccccagtcctcgcgcaggcagccgtgctgttccaggcctgagaggaaggcgtggctgacgaacggattctggccgtcgtgcagggtgtcccagtcggtggcgggaatggactgcagggagtcgaggaagcgggtggagagcatggttggcaaggataggccaggtggatcgcgaacggtgctggcggagctgggttggtttgttccggttgggggtgaggaaagtttgaattgtccatccgtgtgcgcttggtgcggaatcaccggcgcacggctcggcagggtggcggggcgctgcacgagcggcgcgcatcccaccacatggagaaatcaacgatgaagggattgaagcttgcaactgccgcggtcgcgtgcggcctgatctttgtgccacccgtgttggcttctggagatcagccggcaaaagtgcttgaggatccaggtgcctacgcggaggtggttgcgctgttggagcgtgaagctgcgaaccagctgacgcgtcatttgcaggagaggggtgaggtgcgacaaatcagcgtcagcatccgtctggatgtgaaggcaagatcgatggtgatcagctttgggcctggataccttcccggcccggatcgcggttacgacgagctcttcctgattccgatggcgtctacgttgaggtactacgccgagaagtcgggactggatgtgaatgatattgacttcctgtttgacggaaaaacccttgaggaatactaccccgaggatctggccgttccgccgaagacgaaagagaagtcgacgcatacatcagctttggtgtcagcaagccatggctacatcagcttgcatcccagcggagaatggaagttccagcgcccagcgcctctcggcatccaggaagacacgctgagtccactgtttggtgacgaactgcaaggattgatcgaacaacgtagcggtttgacagtgcaccgggcacgcagccgctccacggaactccatccggagtccgggaagccatgggagcacatgtcatcccgctaccacctcaaggcgcttttccccgaacgcaccgacatgtggaatgagtttccgaacagcccagagtctgctcgcgaaaaggaagaggacatacgggctcgccccaactacgcaaaccatctgggtgtggatgtgatgctgagcctgcacaccaatggcagcgattcagccagcctgcgtggaaccgaggtctattatcatcaggacaaaccgcaggacaaggcgctggcggatagcattctctgtgggatgcgtgaaatcatccgagcgcaaccgggctatcgggatttcccgattcgcgagagttcgacctcggccaggcacggcgagaaccgcatcgggaagatgccctcggtgatcgtcgaaaccgcctaccactccaatcctgacgatgtggctgccttgcaggatcccgtcttccgctcggcgtcgatgaaaggggtggaaaagggctatcgcctgtgggcacagggcaaggcctgtgagcctttgacgcttcaccccctttccgatgtcgaggttccgctgcaggcggtgcgcgagctgacagtgggtttcgcgggcaatccccagtaccccctggaacttgaagtggccgtggcagattgcgaccggcccggatactgcacgccgtggaagggccgctttgaagatccggatgcgccggtgaagttcgaagtgagctgctcctccacggagcccggctcagtccgctggaatgtcctgttgcgcgatgcggacgatgtcgtcgcggcaccggtggcgttcacccagtcctgcgtccgggcctgagtggtgcctggagcgggtagtggggttgagaaaacgggcgcttgcgcgcccgttttccttagtcgagcatggctcgactcaacaaaccaccggtcagctggccttgccctgcgcgtccaggtagcgctcggcgtccagagcggccatgcagccgaagccggccgaggtgatcgcctggcggtagtgctggtcggccacgtcgccggcggcgaacacgccttccaccgaggtctgggtagcgttgccgcccaggcccgaacggatttccaggtagccgttgttcatcgccagctggccgtcgaacagggtggtgttcgggtggtggccgatggccacgaagaagccgtgggcatcgatgtcgcgggtgccgccgtccagggtggacttcacgcgcacgccggtcacgccggcgtcgttgcccagcacttcctccacctggtggtgccagacggtctcgatcttgccttcggccaccttcctgaacagcttgtcctgcatgatcttctccgccttcagggtgtcgcggcggtggaccaggtagaccttgcgggcgatgttggacaggtacagggcctcttccaccgcggtgttgccgccgccgaccacgaccacgtcctggtcgcggtagaagaagccgtcacaggtggcacaggcggacacgccgcggcccttgaactcgtcttcggtcgggatgcccaggtacttggcggtggcgccggtggcgatgatcagcgcgtcgcaggtgtactcgtggctgtcgccgatcagcttgaacgggcgctgcgacaggtcggcggtgtggatgtggtcgaagatgacctcggtctcgaagcgctcggcgtgggcctgcatgcgcgccatcaggtccgggcccatcaggccgtgggcgtcacccggccagttgtccacctcggtggtggtcatcagctggccgccctgctgcaggccagtgatgacgaccggcttcaggttggcacgggcggcgtagacggcggcggtccagccggccggtccggaaccgaggatgacgaggcgctggtggcgggagggcaggctggtgctcatgtagactcgcgaaaaggtagatgggacaaggcgctggcgatgtttgcgcagcatccgtggctggtcatagagtggcggctggggcagggcgattcaagccgatgaacagaacgccgtcatccagcggtggtttcacccctgtccgggcccggtcagaagtcgcataactgaaaactgacgccgtctcatttattatcaatcactaacagcgcattccaaaggtatggtctaaggtggcgaagcaggtccctgaacgctccaagtcggacgacagcaaggcgtcacgtcgcacggccgcggcggcgacgaccgacaatccacgccgccagcgcctctggcgcgacctgggcctgatcgcgatcgcgccggccctgctctatctggcggcgagtcttttcacctattcagcgacggatcctggctggtcgcataccggcagcgtggtcgcgccggtgcacaacctcggtggtcgcgcgggcgcctggatcgccgacgtgctgctgcagttgttcggctacatcgccttcctgctgccggtggtgctcggtgcgctgtcgtggattgccatgttcggcctcaagcgcgagagcaagggcgagaacgacctggacccggcgctgcgcctggtcggcctggtcggattcctgatcgccggcaccggcttcctgcatgtacgcctgttcagcggcgatgtctccagcgccggcggcatcctcggcaagctggttggcaattcgctcacggtgggcttcggtgcgctgggcgcgaacctgttcgtgctggtgttgctgctggcctcgatcaccctggccaccgggctgtcctggttcacggtgatggaaaagatcggccgtggcgtgatgtcgctggcaccgttgctggcgcgcaagaaggaagaagtcaccgagtggcagcagacccgggtgatgcgcgaggagcgccaggaagtgcgcaaggccgatgccgaggtccgcgccaagcgcgagccggtgaagatcgagccgcgaccggaaccggtgatcgagaagagtgaccgggccaagcgcgacacgcagatcccgatgttccgtggcgtcaatggcgacggctcggacctgccgccgttggccctgctggacgaccccaagccgcagccggtgggctacgacaaggaaaccctggacgcgctgtcacggcagatcgagttcaagctgaaggatttccgcatcgacgcccaggtggtcggcgccaaccccgggccggtcatcacccgcttcgagatcgagcccgcgccgggcatcaaggtcagccagatcagttcgctggacaaggacatcgcgcgcggcctgtcggtgaagtcggtgcgcgtggtcgacgtgattccgggcaagtcggtgatcggcctggaaatccccaacgtcacccgcgagatgatctacctgtccgagctgttgcgctcgaaggaatacgacaagtcggccagcgtgctgaccctggcgctgggcaaggacattgccgggcgctcgaccgtggccgatctggcgcgcatgccgcacctgctggtggccggtaccaccggttcgggcaagtcggtggcggtcaacgcaatggtgctgagcctgctgttcaaggcctcgccgaaagacctgcggatgctgatgatcgacccgaagatgctcgagctgagcgtctaccagggcatcccgcacctgctggcgccggtggtcaccgacatgaaggaggctgccaacggcctgcgctggtgcgtggccgagatggagcgccgctacaagctgatgagcgcggtgggcgtgcgcaacctggccggcttcaacaagaaggtgaaggaagcgcaggatgccggccagccgctgatggacccgctgttcaagccgaacccggagctgggcgaggcgccgcgtccattggagacgctgccgttcatcgtcatcttcatcgacgaattcgccgacatgatgatgatcgtcggcaagaaggtggaagagctgatcgcgcgcctggcacagaaggcgcgtgcggccggcatccacctgatcctggccacgcagcgcccgtcggtggacgtgatcacgggcctgatcaaggccaacatcccgacccgtatcgccttccaggtcagctccaagatcgactcgcgcaccatcctcgaccagtccggcgcggaaaccctgctgggccacggcgacatgctgtacctgccgccgggcaccgcgctgcccgagcgcgtgcatggtgcgttcgtgtccgatgacgaagtgcaccgcgtggtcgagcacctcaaggcgatgggcccggccgactatatcgacggggtgctggacgaggtgcagacgatgggcgacggcgtggtcgtcggtgccaccggcctgcccgagaccagtgcggccggcgacgagtccgacccgctgtatgacgaagcgctgcgggtggtcaccgagacccgccgcgcctcgatttccggcgtgcagcgccggctgaagatcggctacaaccgtgcagcgcgactgatcgaggccatggaagcggccggcgtggtcagcccgcccgagcacaacggcgaccgcacggtgctggcaccgccgccgccgaagtaaggcccgacgtatcccccacgacgtccaaggaaccgacgcatgcttcaccccgtaccaagcgcgctggcgctggcgctggcagccttcctggctgccggcccggcactggcagaaaccgccacctccgcgcccgccacggcgccgccttccaccagcggcgataccgaagccagcaataatttcagcattgtccgttaccgcgccgactaccaggtgcggccggatgcgggcaatgtgcagaccgaaacctacgaagtcctgctcaagaccaaggcctccgtcgagcagttcagccaggtgcggctgagctacagcgaaaagatggagacgctggaagtgctcggtgcctacaccatcaccgccgatggccagcggcgcgacgtgccggccgatcgcatctacacccaggagagttactccagcgcctcggcggcgatgtatgccgaccgcaaggtgcgggtgatcgtgttcccgaacctggccccgggcacgcgcctgtactaccaggtgcgccgcacccaggccacgccgtacttcccgggctatttcggcctgtgggaaaccttcaacgtcttcaccgagtacgaagacgccgaggtcaccctgactgcgccggccaacctgccgatgttcgtcgacagccgcggcgtgcagggcagcgatcgcccgacggtgaagaacggccaggcgcagtggcgctggcgctaccagcggcgcgaggccatgccggcacagaactggtcggcggcgggctgggagttcggcccgaacatcatggccagcacctatcgtgactggtcgcagatgggacgcgcctaccagctcaaggccggcccggcggccgacgtgaccccggcgctgcaggcgctggctgatgagatcaccgctggcatcagcgaccggcgcgagcaggccgacgcgctgtaccgctgggtggcgcagaacatccgctatgtggcggtgtacctgggcaatggcggcctggagccgaacagcgcgcagagcatcctcgacaaccactatggtgactgcaaggaccatgtgacgatcctcgaggcattgctggcagccaagggcatcgccagctcgccggtgctgatcggtgccggcggtggcccgacgctgccgaagattccggtgctgggccgcttcaaccacgccatcacctacatccccgagttcgatctgtaccttgattcgaccaccgcgtgggcccgcttcgggcagctgccggaaggcgacctcggcgcaccggtgatgcgtacccgcgacgcctcgttggcgcgcaccccggccaacacgccagagcgcaacgccacctcgatggaggtgcgtttcaccttcgacgccaacggcaacctgcgcggcgagaccattccgaagctgggcgagaacgccgagatcggcatgcgcgcccagttctcccagctcaacgcgcagaatcgtgcgcgcgccgaggagcagatcatggccgcgtccggtttcgacgggcgagggcagctgcagatccagggcgtgccggtcgacctgacccggccgttcggctatcgcatggccttccaggccgaggactacgccgacttcagcgtggccggcggcatggccgtgccggatccgccgggcggcgagtcggtgcgtggcctgtacgccaccgcttctgcgccggccaacgagacgccgttctactgcaatgccagcctgcgcgaggaaacctatcgcctgcagttccctgccaatgcgccgatcatcgccatcccggccaaccagcgtttcaccaacgccgctggcgagtaccgcgtggactggagccgcgaggggcaggacgtgatcgtgcgccatcgcctgcagcagaacgcggtgcgtggcccggaggcgctgtgccagccgcaggactacaccgcattccgcgcgttgtatcgcgaagtgcggcgtggcttccgtggccaggtgctgtacggcaagctgccgggctcgggcggctgaatcgccgatggacgttcagggcggcataatgtcgccctgatcgcccattcatctttccccgggcacactggcaaccacctttcctggcgcccgcgcccacaggattcccgcatgaacttccgcttccgccgtttccttgccaccaccaccctggccgtggcctgcgccgccgccggcagcgcctgggcaggcgcccgcgatgacctgaagaccttcaccagtggcctgaagggcctggatggccagttcagccagcaggtgttcgacagccgcggcaaggtgaaggaatcgaccagtggccgcgtggccctgtcggcgccgcgcctgttccgctgggaatacgtgcgcccgcacgagcagttgatcgtggccgacggcaagaaggtctggatgtacgaaccggacctggagcaggccaccgtgcgtgagcagggcaaggaagagcagaacagcccgctgaccgcgctgatcaacccggcactgctggaacagcagtacgacgtcagtgaagaggctgcgcagcgcgacggcctgcagtggctgtcgctgtcgccgaagcgcgagaccgaagccagcttccagtacgccgcgctgggcttcaatgcccagggcctggccaagatggaaatcaccgatgcggttggccagcgtaccgtgatcagcttcagcggctggaagcgcaacccgggcttcgcggccggcaccttcagcttcaccccgccgaagggtaccgacgtcatcggtaattgacctgtgggcggaggcgctttggtgggtgtcaaccttggttgacacgcttttgatctaccggccagcggccggctctaccgatcctgtggcctgatctgccgggcagggttcggtgctgtctgctctggcgggtgtcaaccggcaccgtcatggtgggtgtcaaccttggttgacacgctcttgatctgccggccagcggccggcactaccacccgtgcggcctgatcgccggcatggcccggcgctttctgctctggtgggtttcaaccgggaccgccttggtgggtgtcaaccgttggttggcacgcttgggatctgccggccagcggccggcactaccagacatcgcgtcccgccgccgggcacggcccggcgctaccgttgggcggcgcggtacaatgaccgggtggcaagacatcgttcaacttccttccctggtcccgatctgctgagcgtcgatcgggaacacctgcgcccgctggccgagcgcatgcgtccgcgcactctcgacgaaatggttgggcagaagcgcctgctggcgccggacagcgcgctgcgtcgcgcggtcgaatccggtcgcgtgcattcgatgatcctgtgggggccgccaggctgtggcaagaccacgctggcgctgttgctggccgaatactccgacgcagaattccgtgccatctccgccgtcctctccggcctgccggaggtgcgccaggtgttggccgaggccgcgcagcgtttcgccgaaggccggcgcaccgtgctgttcgtggatgaggtgcatcgcttcaacaaggcgcagcaggacgccttcctgccgcacatcgagcgcggcacgatcctgttcgtcggtgccaccaccgagaatccgtcgttcgagttgaattccgcattgctgtcgcgttgccgcgtgcatgtcctggaaggcgtttcgcccaccgacatcgtcgaggcgctggaacgtgcgctgggtgatcgcgagcgcggcctgggcgaagagggtatcgaggtcgcccccgaactgcttctggaaatcgccaccgctgccgatggtgatgtgcgccgtgcgctgaccctgttggaaatcgccgcggaactggcgggcggggagggagggcgcatcacgccgcagaccctgacccaggtgctggccgatcgcacccgtcgcttcgacaagggcggcgagcagttctacgaccagatctcggcgctgcacaagtcggtacgcagctccaacccggatgccgcgctgtactggctgacccgcatgctcgatggtggctgcgacccgtcctacctggcgcgccggctgacccgcatggccatcgaggatatcggcctggccgatccgcgcgcgcagagcatggcgctggaagcctgggacatctacgagcggctgggcagcccggaaggcgagctggcgttcgcgcagctggtgctttacttggccagcaccgccaagtcgaacgccggctatgccgcattcaaccaagccaaggccgacgtgcgcgagagcggtaccgaagaagtgccgctgcacctgcgcaatgcaccgaccaagctgatgaaggagctcggctacggcgccgagtaccagtacgaccatgacgccgagggtggcatcgcgctggaccagacgggtttcccggatgcgatgggcgaacgggtgtactacaaccccgtgccgcgtggcctggaaatcaagctgaaggaaaagctggaccggctgcgtgccgagcgcgaagcggcgagggcggcaaagggtcgctgacccggtttatgtagcgtcgagccgcgctcgactccgctctggaccgggccagcagcgcctgcggcaacggcagccgagcatgggctcggctctacagggccaatggcagccgagcatggctcggctccacattgttcccggcggcggtctttggcacactgcgcggccactttttcaaggattgatgccgtgcaggaaatgattctgccgttgaagcgctacgcccagttcgaggggcgtgccaaccgtcgtgagtactggatgttccagctgttcatgctgatcgtctccgccgtcctgatggtgccgctcgttgccgggctggtgatgcagtccgacgtcctgggcatcgcgtcgatcatcctgtttgtcgtgttctggctggccacgttcgtgccggtcatcgccgtcaccgtgcgccgcctgcacgactgcaaccagtcgggctggatgtacctgctggccttcgttccgttcggcggcctggtgatcttcgtattcgcgctgctgccgggcacgccgcaggaaaatgcttatggtccggtgccttcggggccgtgacatttcgcgagtcgggcatggctcgactccacaagaggcaaagaaaagaagccggcatttcgccggcttcgtctttacttgatggtgcagtcgccgaaggacaggtagtccgtgccggaactgaactgcagcgtgcagctggcggtgaacgtcgcgccttcttccagtgcgcccagcttggccgcctgctgttcgtcgtcgctggtcagtcgggccaggacattgccctggtcgtcgccggcctcgatcagcggctcgcccgccaggttgctggaaacgctcagggctacggcagtgaatgtcaccgtctggttgagttggtccatgcccagtgacgaattgccggcttcttcaaaggcctggtagagcgttggcaggtcctgtgcggcatgggcggccagcggcgcaagcaggccgagggagagggcgatcagggtggtgtgcttcaagggagtctcacaatcatgggatccaatcccatgccggttgtgtgcagatgaacgcgacccggatggcggcaagtgcccgccatccatggctgcgctggaagcggggcgatccaatgccccgatgggcggcaaaataggggaattgctgccccttgcgcaacccgggcatgcgcgcgcgtgatacacagcgtgacgtttgatcgatgtgataatcattcgcgtttaaggtagactgcggtcccttgtgaaccggcggccctgggccgcttctgccgccgctgatgaagcactttgttccgccttcgcgccgtggtctgctggcccgcggcttggccgccttgatgatgggtctgctcctggccaccccatatgcccatgcacagcagcgcaacccgctgcagaagatcggccgcaccgtgctcgacgagccggcggccagctatcgcttcgagcatttcgtggtggacagtcccgaccagcaacgccgctggcgggtgaacctggcgattccggccaaggccggcaagacgccatccccggtgctctacgcgctggacggcaacgccgtcgcgatggtcctggatcagccgttgctggccgagctggccgcgcgcaaggcgccgccggtgctggtgctgatcggctacgacaacgacctgcgcatcgattccaaggcgcgcacccgcgactacaccgcatggatcgaccgtgccgacgacgagagcggtacgacccaggcggttggcggtggggctgccgcgttcctggatgtgatcgagcgccgcatcaagccggaagtggagcgtcgcgcacgcatcgacacgcagcagcaagcgctgtggggccactcgctgggtggattgttcgtgctcaatgcgctgtacacgcgtccggccgccttccagtcctatctggccgccagcccgtcgctgtggtggagccagggtgcggcgctgggggatccggaacaacagttcgtgcagaacgtgcacggccaaccggcaaggctctggctgatgctgggcggtgccgagcgtgtcggtgatcgcggcaagcgcgacatgaacaatccgcgcgtggtagcgcacctgcgccgcatcggtggcgccaccccggatgcggcgatgcagctgtccgagcgcttgggcaaggtgccgggcctgagcgtgcagtaccgcgagttccccggccttggccacggcccgatgctgccggcgtccttccatgcggcgctgcatgagctgtacggcgtgaccgatcgcagcgccggcgatggcgcgcccaatggcggtgacaacgccgccgaatgaatcccttcgcacgcgctgccgtgcgaccccactacccaggcgaggctgccgacgtgcagcggcccaggcaaccgatgacccccgcgccacgtggcgcggcctacgtgtgcaaggagcctgccatgtcgttccgtccgtctctccgtcttacctctctcgctgccggcctgctgctggcagtgaccgccaccgcgcagccggtgttcgaccagccggccaacgccaccttcaagggtgaggtcggtcgtctcacgcggtgagaacgtggttcccggcagcaccgccgacgtggtcggccgtggtttcgtgccgggccagaaggtcagcctgctgcgtggcgacagcgtgctcaacgcacagccggtggtggtcgatgccgatggcaacttcaagacccagctgagcattccggccgacgcggtgccgggaacccacccggtggtggtgcgcgccagccagccggctgcggccacggtgctgaagctgcgcgtgtcgccgcagttgccgctgtccggccaggcgcagttcgccacccggtccagcaagctggtgccgggcctgtaccagtccgcctacagtgccgccagcaacgcagtgttcgtgacctcggcggtgggtcgcccgccggtgacccagtcgcagctgctgaagctggacccgacgtcgctgaaggtgaccagggcgatcaccccggcgcaggtgccgggcagcaccaatggtgcggtgtacgcggtctacggcgtgggcgtggatgacaccaacggcaatgtctgggtgaccaacacccgccagaactcgatcgcggtctaccggcagaaagacctgtcgctggtccaccagttcccggccgacactgtgccgcacgcgcgcgacgtggtggtcgatggcacccgcggcaaggtgttcgcctcggcaacgggcgaggaccacctgtcggtgttcgacgccaggaccttcaaggagctgccggcagtgacgctggaatccggcgtggacgacggcacgttaacaccgatgagcctggtgctggacgagaagggcggcaagctgttcacagtcagcatcggcaccccggaagcggcggtgatcgatgtggccagcggcaaggtcgagaaggtcatcgatctgggtaattcgatcagtgcctcgggcgtggccttcgatgcggcacgcaaccgcctgtacgtcgcctcgcagggcaccgacaacctgctgatcgtcgacgtggctgccggcaaggtgctgcatgacgtgccggtcggcgccggtgcgctgaacgtcgccttcgatgatgcctccggcctggcctatgtcagcaaccgtggcgctggcacggtcaccgtggtgaatggtgacggcaaggtggtcgccaatcttgatggcggcacgctgccgaaccacgtccgcgccgatggcaagggcaacgtgttcgcggtgaacaagtcgcgcggcgctgaggacccgaagggtgaccgcatcacccgcatcaccccgaagcagtaagtcacacggtggggcggcgtgcgcgccgccctgccagcaaggagaacgagcatgaacatcgcgtcccgtctgcgcctgtgtgcgcttccgttggctgtttcgctggtactggccgcctgtggcggcgcgtcgacaccgcctgatggccagaaggccgccgagccgcccgccgcaccggccgctgccgaaaccgcgttgccggcaggctggcagcgcgtggccggtgccgagctgccggccgtgcatgaccagaaggcggtgctgccggccaaggtgcattccgatgacggcgccgatatcgaggtgaccgataccagccggatcattgccggtggcgacgacgtcatcgcggtgatcgaagcactggggctgggcacgcaggtattcgccgcgccgaccaacaccaccacccaggccggcctggccgcgccgcaccagttcctgttcaaccgcaccaccggcgtggagggcgtgctgagcctgcagggctcgctgttcctcggcaacagcctgcgccgccacaccgagctggccaaaaagctgcgcgaagtcggtgagccggcggtggtcatcgatgatctgcagccggccccggacaaggtgcgcaaggtcgccgccgcactagggctggccgaagcggggcaaacattggccacgcaggtgcagcgccagctcgacgaggctgcagcgattggcaagggcctgggccatgcgccacgactgatccacgtatcggccaccggcgctggcggctcgcccactgttgccggtgccgacagcgcgtcagcgcagctgatcgcgctggccggcggcatcaacatcggcaccgaggccggggtgaagaactactcgcagctgagcaacgagggggtggtcgccgcggcaccggaggtgatcctggtgaccgagcatgacctgcggctgttcggcggtgccgaaggcctgtggaaggcgtacccgacgctgaagcagacgccggccgggcaggccaatcgggtctgggtgatgccggatgtgcagctgaagtacaccagcgtgggttctggtgcgggcgcgctggcgctggccaaggccctggcagccttgccgaaggcatgagtccggcggatcggcgccgccgtcgcgggcggacgatgttgatggtggcgttgctggcgctgctgggggcagtgctggcgtcgttcgccgtgggtccgttgcggttgccgccgctggaggtgatgcaggcgcttgcggtgaagctgggcctgcttgacccaggggcagtcagcagccgtgatctggccgtggtctggcagctgcgcattccgcgcgccctgttgggcgcgatggtcggtgcgtcgctggcgatggccggtgccagcctgcagggcctgtttggcaatccgctggccgaccccggcatcgtcggtgtcagccagggtgctgcgctgggtgcggtggctgccattgttctcggcgctgccggtgcggccggctggctggtgccggtggcagccttcgtcggcggcgcgctggcgatcggcctgacctatgcgctggcccggcccggcaaaggcagtgggaatgccacgctgctgctggtcggcatcgcgatggccgcgttctgctcggcgctgattggtttccttacttacatcgccagcgaaagcgagctgcagtcgctggtgttctggcagatgggctcgctggcgcgcgccaactgggccgacgtggccgcggtggtgccgctgcttgcgctcggcgtgtatgcgctgcagcgactggccacgccgctggacatgctggcgctgggtgagcgccaggcgcagcacctggggctggacgtgacccgtacgcggcgtcgcctggtcgcgttcagtgcgctgctggtgggcgcagcggtggcgttcgcgggctcgatcagcttcgtcggcctggtggtgccgcacgtggcgcgactgctggtcggcccgggtcatcgctggctgctgccgttgtccgggctgctcggtgcgctgctgatcgtggtggccgacaccgccgcacgcacgctcgatccacctgcggagattccgctgggcctgttctcggccgcgctgggtgcgccgttcttcctgtggctggtgctgcagcagcgccgcaaggcggcgccatgagcgtgctgctgaagctgcacgaggtggtggtgcgccgccagcagcgcgagatcctgcatggcatctcgctggcgttcgagccgggcacggtgaccgcgctggttggcccgaacggcgcgggcaagtctacgttgctggcggtggcggccggtgacctgcgcgccgatgcgggggaggtgagcctgctgggcaagccgttggccagttacaaggcggggccgctggcacgcgagcgcgcggtgatgccgcaggaacatggcgtgcgcttcgccttcagcgtggaggaagtggtggcgatgggacggttgccgcatccgccggatccgcgtgtggacgatgcacgggtggaagctgccatcgatgccgccgaactgcaggcgctacgcctgcgcgaagtgcagcagctgtccggtggcgagtccgcccggaccacgttcgcgcgcgtgctggcgcaggacacgccgctgctgttgcttgatgaaccgaccgcggcgctggatctgcgccaccaggagcgtacgttgcgcagtgtgcgtgcctgtgccgaagccggcgcgtgcgtgatcgtggtgctgcacgatctgaacctggccgccggctatgccgaccgcatcgtgttgctggaacagggcagggtggccgccgatggcacgccgctgcaggtgctcaccgaagacaacctgcagcgggtctaccagcaggatgtggtggtgctggagcatccgcggcgcggggtgccgttggtggtggtgacgtagtccggatctgctgccgtcgccgcgtatcatgtctgaccggtattccctcaatggactgatgcaacgatctgtagcatttcgcgcggcacgctgctggccgtgttggttggcttcgcaggcgctgcgactgcggcttccacctctccggtttcgctgaccgatgcggcggagaatgcctcgctgatcgagatacggcattccgctggcgcgggttcccctgttgcgtccatccggacgcagtacttcgccagcgaggaaatgtccgtgagttgggatgaccagcaggtgctggtgctttgcaaggaggcggcatacctgcagattccccctgccaagctcaaggccgctgcgttgagcaccgagcagcgccagatgatcgtctaccaggcgctgatgtccggcctgggtgctgtcgcgggcgtggtcgggccggcgggcgagatggtggctgtggcggatgacggaagcgagacccgcagcattggcgaaagccattgggcgtacggtatcgagcgctacgacgtcaccacccagcgcatgccgggcggtgcgctgcgtgtgcattcccgcaagaccgagaccgtgaacacgacgcccccggcgagcccggacgacacgttcagcaccgaggatgaccaggcggcacgcctgtccgaactggcgccggtggggagctggaccgaggtgctgatccatggtggcccgcggctgccgcacattgacccggcgacgtcgctgaaggggtggatttcgatgggggatgaccaggcggcgaccgtggccggggcgcgcacgctgcacggctgcaagtaaaggctgagaggtcagaaccctttgcccaggggcaaagggatctgaccccgatcattgtcggcctcatcgttccatttatgtttgcaatattcacttgcgcgccagattggcaggtctagaatgcgccccatgaatcggatgccgctcctgaagtttttcaccctgacccgcgccaacgcggaacgggcgtgtttgcctggagccccacgaggccgttgaagcggccatcgctggaccttcgacagagcgccccccggggcgctctttttgtttttgttagtcgactaacagtcgactctacccagtcgacgctacccagccgacgctacccagccgacgctacccagtactgcaaaggagaacgtgccatgcaccagatcgccgagaccgaacgctagccgcgcaccctgtcgccaaccggggggcgcggcccctgaagttggccttgcaggaatctctatatgaacacccaagtcctttcccgtcgtcgcaaccttggcatcattgcccacatcgacgccggcaagaccacgctgaccgaacgcctgctgtggaaaagcggcgagatccaccgcgtcggtgaagtgcacgacggcaacgcgaccaccgatttctcggcgatcgaacgcgaacgcggcatcaccatcggcgctgccgccgtgcaggcgcagtgggcgccgcgcgacctgccgccgcatcggctgaccctgatcgacacccctggccacatcgacttcgccatcgaggtcgagcgttcactgcgcgtgctcgacggcgccgtggccgtgttctcggccgtggatggcgtgcagccgcagtccgaaaccgtgtggcgccaggcgcgtcgccaccgcgtgccgctgatcgctttcgtcaacaagatggaccgcgtcggcgcttcgttcgagcgcgtgctggagcagctgcaggacaaactgcgggcgcggccgtgggcgctgggggtgccgttgggcagcgaaagtggcttcaacggctgggtcgatctggtcgatgagcgcgtgctgcagtggcaggatggtgccgcaaccacggtgaccccgtgggaccaagcggcgcgggcccagtggcaagcccaacgcgatgcgctggtcgaggccgtggccgatcacgatgagcaactggccgatgcctggctggaaggtcgcgtgatcgatgccgggcagctgcgcgcggcgatccgccgggcgacgctggcgggtgcgggcgtgcccgtgctggccggtgctgcgttcaaggacaagggtatcgagacgctgctggacgccgtggtcgattacctgccgtcgccgctggatcgccctgccgtcagcgccgaaagcgatgagggcgaggtcgtgctgccgccggacccggacggtccgctggccggcctgctgttcaagatcacccaccagcagcacggcgcgttgagcttcgtgcggctttactcgggcaccttgaaggtgggcgatgcggtggccagttcgcagcatccgcaggggcggcgtgtcagtcgcctggtgcgggtgcaggccgaccagacccacgacatcgaacaggccgtggccggtgacatcgttgcagtgctgggctggaaggatgcggtcagtggtgaaacgctgagcggccgcgcgcagccgctgcgcctggagaacatccaggcacaggcaccggtgctggcgtggcggttggagccggcgcgtgcggccgacctgatccggatggcacagggtttggccagcctggcccaggaagatccctcgttccgcgtcgaaaccgatcgcgacacggcggagaccctggtctggggcatgggcgaactgcacctggaggtgatggtcgagcgcctgcgcagcgaatggaaggtcgacgtaggcgtaggtgcgccgcgcgtggcctaccaggagacgccgatgcgtgcgatgaccggcgtcgtcgggcggctggtcaagcagaccggcggccagggccagttcgcgcacgtggtgctggatgtatcgccgcgcgaggacgaccaggtcgtattcaacgaccgcatcgtcggtggcgtggtgccgcgcagcttcatcgcggcggtggagaaaggtgtgcgtgctgcgctgtcggaaggcccccagggccatccggtggtcggcatcgaggtcagtcttgtcgatggccagacccatgccaaggactcctcggagatggcgttccatcgcgcaggcgccgaggcgatcaaggcggcgctggccgaaggcggcacgcagctgctggagccggtgatggcggtgacggtgcattcgccgtcagcgtcggtgggtgatgtggtcggcgacctcaaccgccgccatggtcgcattgcccgcatcgacgatcaggatggtcgcgccgaggtcagtggcttcgcaccgctggcgcagctggtgggctataccacctcgctgcgttcgctcagccaggggcgggccagcagcgaggcgcacctgcatggctacgagccggtgcgcgctgcatgaagaaggtgaggggagcccgttcgcgggctcccttttttgtgggttcgggtttccgcatccatgcgtggcgtggatctaccggctgatcgggtcgcgagctctgcactagatccacgccatgcgtggctggggccctcgcgatgcgtttttttgcattgcgatgcaacaaaactgcagaaaaagctggattaaagtgatgcctcacgataaattgcgcaccccccgttgctcgccgccgcccgcacccctctcatgcgtgatgacaaagaccccggaaccctggagctgaccctgccgcgcaagcgcggtcgtccgcccaagttcgggtatgcgatgagcgatgcgcagcgggccgcacgctatcgtgcgcgccgggcagggcaggccaaccacgccgatgtgcgctcctgcagcgacatggtgctgctggacaagatccgtgcagcggtgagcgcgcgcgacaccgaactggccggattcctggtccacgtgctctggcagcgctaccccctgcagctgaaatagctcgctggcggggtggccgttgtcatcgagcttgttgataatgcgggattcaggttgttcccgctggcgtgcccgggatggcaggcgcgcatgatcgaacggttcccaagatgaccaccaccagcgacaccaccaccgaagcggcgccgagcggcgctcccctgttctatacccgtccggtgccgctgcaggccgatgtgcacgccgatctgcgcatcctgccgggcaagctcgagttcgccgccggcaacaacgccattccgctggtgctgggcgagttctcgctggcgctgcatcatttcccgatcctgttcgccggccccggtgcggttccgatggctgccgtcggcgtgtccgaccagaacctgttcatcaaggacggcctgtgggaagacgaggcctatattccggcctacctgcgccgccaccccttcatcttcatcgacaccggcgcggagaatgacttcctgctgggcatcgacgaagaaagcccgcgcgtggtcaagggcggcgaggaaggccagccgctgttcgttgacggcaaggccaccgaaatggtgcagcaggcgctggagttctgcggccagtacacccgcgagcacgaacagaccctggccttctccaaggccctgaccgacaacggcctgctggtcgagcgcaacgccaccgtgcgtaccccggatggccgcgagttcaacctcaatggcttcctggtggtggacgtcgagaagttcgttgcgctgccggaagccaccgtggtcgagtggcaccgcagcggctggctggcactgatccaccagcacctgatgtcgctgggtcgcttcaatgacctgacccgtcgccaggtcgagtgcctggccgcctgatcaaggcattggcagggttcccgctgggcgggagccctgtccggccttcagcacgtccagcaggcgccgcgcatcggcccagtccggcgcggcgtcatgcgccaggtcgaccagctccgccgcgatggccgcatgctcgcattggcccagcatctgcagcgtgccctgcaatcggtgcgcgtgatggcccagtgccgatgcatccgctcgatcaataacccgctccatgttgccgagctcatcgtggatgtcggcgatgtaggccgcgtccatgtcaatcgtctgcgcggctgcgcccaggccctctggtcgcgcaatgccgagcgcaggcagcagctgggcggcgcgcagcggcttggccagcaccgcgtcgaagcccgagcggtggcagcgtgcgcgatgacgccgtccggtgcgggcagacaatgcgatcaggcgaacggtgcgcccggcagacccgcgtagctcgcgcgccagcacgtgaccatcggcgccaggcaacccaatgtcgatcagagcaacggagcggggctgtcgtgcctgttcggccagggcactggccgcatctttcacggcgcacacctctgcgccccagcgccgcagctgttcggcgatcacgtggcgattgagctcgtggtcctcgaccagcagcaggtgcagtccggccagtggcgtatcgcccacgggcatgtcctgggcatccaccccggtgccagccgggcacaccggcaggcgcaggatgaagcgactgccacggcccagcacgctgtgcacggtgaggtcgccgcccattgcgcgggccagctcgcgcgcgatggaaagccccagcccacttccgccacgccgctgtccgctgctgccttgctggaaaggctggaacagggtggctacctgcgccggcgcgatgccgatgccgctgtcgatcacctccagcagcagcgcccgcggacgcgccgccggcatcagttgcaggcgcagctcgatgcgaccggaatcgctgaacttcactgcgttcgccaatagattgctggcaatctggcgtagcgcatcggcgtccaccaggatgttcgacggggatgcgccctgggcatcgagatgcagctgcaggcctttccgctgggcctgtggccggatcgcctccagagcctgccggcacagctgggttgcatcgcagggttgcccatgcggcttgaaagcgccgctcgcaaggcgcgaaaaatccagtgcgcgattcaacaggctgcgcagggattggctggcgctgctggcagcggcgagcaggtcacgctcgcccttgggcaatgtcgattgccccagcagctcgatcgaggtcagcacggcctgcgccgagttgcgcatctcgtggctgatcacgccgatggcatgcgcgctgcttcggtcaccgcgcgcccgcaggtggagggtcggcagggattcatgcaaaaaacagccgtgcagttgattcatagcgaaagcttgcgctccatcatgccggccacaggctaggtcttccgagtctgccgggatgggactgtcgatcgttccggcggttcgggcttgtcttcctgtaagcgcaattgcgcgagcaactgctccaacgtctccaaccggaccccggcgcgcagcgcctccgcttcagcatgctcgcggcgctcccgttccttcgcggcatccgtgcgggcgccggtcagttcggtgtgtgcggcttccaaggcctggagatcttgcgcccaccgtgcctgcagggcctggtgctccaccgctgtctgtcgcaatgcgtccaattgctgttgctgggcttgcgccgcttggcgggtttgcgtcaattcccgttccaggcggccgtgccgttcgagccactgactgttgtcgcggttcagttgcagcagctcgtggtttttggcggtcagggcctcattggcctgacgcagggcgacctgcagttcctggacctggtgttcgtgccggcgctgttcctggtcacgctgctccttgaccgaggttcggtagtgttccagcgcctcgcgggcatgctggtgcttttcctccaatgatcgggcgtgggcctcgtgctcggccaggcgcgtggtcaggccggcgatgcgctcttccagttggcggatcgtcatggtggcatcggccagtgccgtttgcgtcgtcgtgtgctcgctcttttccgcctgcaacgcggtctcggtgcgctgcaactgggcgctcaacgcggcgccttcctgccgctggtgttctaaggcctggctgcgttcctgcaactgggcctcgaagccctgacgcgcctcggtcaccaccgtatcggcctcctcctgcaggcgtccggccagccggccgaccagatcctgcaacgcctcgctgaccgcgaccttggcccccgggccttggccctcttcttcttccagttccttgaggtggcggtggatcgtggttttggagcccgtgttgcccagtgccacccgcacggcgtcgaccgaggggtgcttgccctgcgcccgcagggcgtcacgggccttctggatatcgctcttgtacaagccgccacgtgccatgatcctctccggacgatttcgtaatgtattacataccacgtaattacatactatttcaagatcagaactagccttagattgcaataaaaatcaggcgggataatggcggattatcccgcctgacccctcgcaagtggtacttagtggccgccaagtagtacgaaatggcctgcgccgggaactttcgggattcggtgcgcttccaagcgaacagtccgcagtacacttgcttggcgatgccccagtcctcggcccctctcacgcgaagtctgtccgtggtgccctctggccacggggtcgcgttgtattgcgagaaatggccatgaaactgcgtgcgctccggactcgatcactccgtctgcgctttgcttggctggcgttgcttgcgctgctgttccagcaggttgcgctggccgcctacgcgtgcccgatcgccgagacgccgccggagccgaagatgatgatggccggctgcgaaggcatggagatgccagacccggccgcaccagtgctgtgcgaccagcactgtcagcgcgatcatgtcgcccaacctgaccttaaaaccccgcaggtcccgccgctggcattgccggcgcgtcacttcaccctgaccgagacactactgccgccgttgcaggcccagtactacgaagacgtgcccacctgccagtccgatccaccgccggcgcagcgcttctgtagcttgcagatctagcccccgaccgcgacctattcccgcgctgacgatttcggcggcgcgctcgtcgttgcacgttcggaggtttcatgtcctttccattctcactgcaccgccagtgcagaactcgtcgttggcctgcgtggatgctggccatcggtttcatggtcacccctgcctggtccatcgcggctggcatctctttcaatgacgcgcagcgcctggcggccgagcgcgctcccttgctcaaggcgcgccagtcacaaattgcggcgacccaggaagaagctgtccgcgccgctgccttgcccgatcccaagctgacgctgggcctcaccaactggccggtcaccggcgccgacgcgttcgattttcgtgccgacgacatgaccatgaagcagatcggcgtgatgcaggcgttcccggctcgcgccaaacgccaagcgcgtcaggccgtagccgatcgcgggatcgagcaagccgaggcgctgtcggtggccgaacagttggcggttcagcgaggcacggccgaggcctggattgccctgtgggctgctcagcgcgaagttgctgcgctgcagaccctgcgggaaccggcctccatcgccgtccacgccgccaaggggcgtttgacgggtgccactggcacggtgaccgacaccctggccacgcaagcggcggcgctggaattggagaatcggattgatgccgcgctggccgcgttggaagccgctcgcgctggcttggcgcggtggcttggcgtggatcctgtcgatgtggaagccgaggatgcaccgcccgagttgacggaactgcctgtcgatccggccacgctgctggcctcgatcgacagccaagggccgctgctgccatggcgctcgcgcgaagccctggctgaagcggaagtcgacgctgccatcgccgagaagcggcccgattggagcctcggcgtgacctatgggcaacgtgaccggatgccgaacggtgtttcccgtagcgacatgctgatggtcgagttcgccatcgacctgccgctgtttccgcgcaatcggcaggaccgcggcgtggcggcgcggcgtgccgagttggatgcggtggccgccgaacgcgaagatgcccgccgcgtccagaccgaagccgtacgccgcaccttggccgactggcagggcctacaacgccaggtggcccgcaaggaaacccaatctcttccgctggcccatgaccgcgcgaagagcgcgctagcggcctacgccggtggcggtgacctgcaaccgtggctggaagcgcgtcgcgacgaaattgcattgcatatcgaacacgcccgccacttgggcgaactcggccgcgcctgggcagcgttggcctatttgctgcccgaggagagcacaccatgacgtccacgacgacccgtttaatgctggcgactgccgcggttgcactgctggccataggtctcggcaccggctattggtgggcgcagcgtcgcgtcggtccagacatgaagccgatgactgccgcgccgatggcgagtcagagcgagcgcaaggtgctgtactggtacgacccgatggtgccggaccagcacttcgacaaggccggcaagtcgcccttcatggacatgcagttggtgcccaagtacgccgacgaagttgccggcggcggcgtgcgcatcgacgccggactgcagcagagcgtcggcattcgcaccgcgcccgtcgaagtcagtcgcctggcgtccacggtgcgcgtgccgggcacactgacctgggacctgcgtcaggaatcggtagtcagcgcccgtgtcgaagggatcgtgagccgggtgcaggtgaaagctccgtacacgaaggtcgcgcgtggccagccgctggcggcgttgctggcaccgagttggagcagtgccctggccgaggcccaggcgctgcgccaggcgcagtcgacttcggcgcgggagctgcagtctgccgcccagcaacgcctgcgcgtgttgggcgtgccgagtggcatggcccgcgacggcagcgtgacgctgagtgcacccagtaatggtgtcgtcaccgaagtgctcgcccgcgaaggccagacggtgatgccaggcacaccgctgttccgcgtcaacggcatcgacaccctgtggctggaagccgcgattccgcaggccagcgccacgtccctgcaccccggcacatcggtggaagccatcgtcagcgccatacccggccagaccttcgccggggaagtcgaagcgctgttgccgctggtcgatatcgccagccgcacgcagcgggcgcgcatcgtgctgcgcaatcctgacggtgtgttggcgccgggcatgttcgccgaagtgacgttgcaaccgcaggccggcacggcagttccgctggtgccgaccgaggcactgatcgcgaccggtgccgacagtcgcgtcatcgtgcaggacgccagcggcggcttccgtccggtgcgcgtctcgacggggcgcagtagcaacggtcgcaccgaagtcctgaccggactcaaggggggcgagcatgtcgtggtctccggtcaatttctgatcgattccgaggccagtctgtccggcgcactggaacgtctgggggcaccggaaaccgcgtcgccggcagtgcccatgaaagcactatcgccgagtagcgcgccggaaatcgtcccaacatcgacgccggcaaagcccgctgctgtcgcaccgccgcgctcgtgcccggtgcagtactggtatgacccgatgaagccgggccagcacttcgaccagcccggcaaatcgcccttcatggacatgcaactggtgccgaaattcggaccgggtgcggcgcccgactgcaccatccgcgatgtgccgttggcaagcccggagaagcagccatgatcgcccgcctgatccacgcctgcatcgccaaccgtgtgctggtgctgatggcagccgtgctgctcgtcatcgccggcgtgtggtcggtgcgacacacgccactggacgcgctgccggacctgtccgacacgcaggtgatcatccgcacgcagtggctggggcagactccacgcatcgtcgaggaccaggtcacctatccgctggcgacgacgatgctgtcggtgccgggcgtcaaggcggtgcgtggcttttcgttctttggtgattccttcgtctacatcctgttcgatgacgccaccgacctttattgggcgcgctcgcgcgtgctggagtacctgagtcaggtgcgcgaccggctgccgcaaggcgtgagtcccgcactcggcccggacgccaccgggctgggctggatttaccagtacgcgctggtcgatcgcaccggccagcatgatcttggccagctgcgcgccctgcaggactggttcctgcgctacgagctcaagaccatccccgacgtggccgaggtcgccagcatcggcggcgcggtacgcgcctggcagatcgcgcctgatccgcaggcgttggccgcccgcggcctcaccgtggcgcagctggtcgacgccgttgatgcggctaatggcgccaccgggggttcggtaatcgaacagggcgaagccgagctgatggtgcgcagcgaaggttatctgcgcagccaggccgcgttcgagcaggtgccgattgtcagcacgaccgagggcgtgccggtgctgctcggcgaggtcgcgaccatcgctcgcggcccgaccttccgccgtggcatcgccgaattggacggcgaaggtgaagtcgccggtggcgtgatcgtgctgcgcaccggcaaggatgcgctgaccgcaatcgagaacgtcaagacacgattgaaggatttgcaggccaacttgcccaaaggcgtggagatcgtgccggtttacgaccgctccgaactgatccacgaagccgtgcgcaaccttacccacaagctcggtgaggagttcctggtcgtggctctggtatgtgcactgttcctctggcacctgcgctcggcgctggtggcggtgatcacgttgccgctgggtgtgctggccgcgttcatcgtcatgcgctaccagggcatcaccgccaacctgctgtcgctgggcggcatcgcgatcgccatcggtgccatggtcgatgcggccgtcgtcatgatcgagaacgcgcacaagcacctggagcattggcgcgaggaacacggcgatgaaccacaaggcgaagcgcgctggcggctgatggcgcagtccgccgctgaagtcggccccgcgttgttcgccagcctgctggtgatcacgctctcgtttattccggtgttcgcgttgcaggcgcaggaaggtcggctgttctcaccattggcctacaccaagacctacgcgatggccgccgctgccgtcctgtcggtgacgctgattccggtgttgatgggctacttgatccggggccgcatccgcccggagcagcagaaccccatcaaccgggtgctgatcgccggttaccggccggtgctggactgggtactgcggcatccgcgcctgaccttggggttgagcggcgcgctgttgctactgaccgtgattccgtacacgcgcctgggcagcgagttcatgccgccgctggaggaaggcacgttgctgtacatgcccacggcgctgccgggcctgtcggcggacaaggcccggcaactgctgcaactgtccgaccgcatgatcaagaccgtgcccgaggtcgcgcacgtgttcggcaaggctggtagagccgagacagctaccgatccggcaccgatcgagatgttcgagaccacggtgacgttcaaacctcgcgaccagtggcggccggggatgacgccggacaagttgcgcgccgaactcgatgctgcagtgaaggtgccggggctgaccaacctgtgggtgcccccgatccgcaatcgcgtcgacatgctcgccaccggcatcaagagcccgattggcatcaaggtatcggggccggacatcggcgtgattgagcagctcagcagcgacgtcgaacgcgtggccaagaccgtgccgggcgtgcgttccgcgctggccgagcgcgtcactggcgggcgctatgtcgacgtgcacatccgcccggggattgcagcacgctacggcctgagccaagccgaattgcagacgctcatcgcgaccgtggtcggcggtgatccgatcggcgagacgatcgaaggccgcgagcgttacccgatcgtgctgcgttacccgcgtggacaacgcgactcgctggatgcgctggtacagctgccactggtcgcacccggtggcgtgcagctcaccctgggccaggtagccgacgtgtcgttgagccccgggccacccatgctcaaaagcgacaacggccgcctggtcgggtacatctatgtcgacgttgctggccgcgacctcggatcggtggtcgccgacttgcaacgcgctgttgccgtgcaggtgaagctgccaccgggttacggcatcgcctggtcgggtcagtacgagtacctgcagcgcgccttggcccggttgcagtgggtggtaccggccgcactggccatcatctttctggtcatctggctggttttccggcgcttcggcgaggtcgcgatcatcctgctcaccctgccgttggcgctggtcggcgggctgtggctcatctggatgctgggtcatgccgtgtcgatcgcaacgatgatcggtttcatcgggctcggcggggtcgccgccgagttcggcgtgatcatgctgctgtacctgcgccacgcttgggaacggcatctggccgcgggcgaaccggccacggtcgccacgctggaagccgcaatccgcgaaggcgcggtgcttcgcgtgcgccccaaagccatgaccgtcgccgtgatcttcgccggcctgttcccgttgttcatcggcgccggcgccggctcagaggtcatgcagcgcatcgccgcgccgatgctcggcggcatggtgaccgcgcccctgttgtcgatgctcgtcattccggccgcgttccgcctgctgcgcgggcgcgctctgtctcgaacttcgtctgccgtatcggtggacaccgcgacgtgagcggcgcattgggttcgctcacttgacaactttaggagattcatcatgaaacgtcatttcgttaccgctatcttgactgccgccctcggaatgttgagtgcttgcaccaccacgaccgccgcgcaccgtctgggctcggtcaagaccgtgtccgaccacaccctgcagttgtgcttcgatccacaggcagtaccgccggtcgccggccagcaggttcaactggtacgccgccagcaattcggcaacccgaagttcccgccgaccttccgcgaacgccccgtcggcacagcacggatcgatgccgacgtagctgggcgctgcgtggccgctacgttggtcgaaggcaaggcgcgccgcttcgatgaggtatatccgctatcggccgaccgtaagccgcattgaagcagcaccaccggaaccaacgacggcagtccgattgcgctgccgtcgcaccaacctgcaatcgaactacgcaactaccgaaggagaaccgtatgaaaatgaccctattcgtttccgcattgactacgctgctgttggcggcctgctcgcaggcacccagcggtgacaccgctatgcaaggaaccgacaacacgcccatgccagctgcggagcacgcgccaatggccgaccaggcaaaaccggccactggcgacatggcgcaatcggccaagacggcatcggctacgggtactgtcgaagccgtcgatgcggccgctggcaagatcaccatcgcccacggcccggtggacgcgctgggttggccggcgatgacgatgggcttcaaggccacacctgaacaaatcgcctcggtacaggcgggtcagaaggtacatttcgagttccaggcacaggccatggaagcgacgatcacccagatcatgccagcccagtaagctgaatcccagcggcgcatggtggccatgtatcgccatgcgtcgcactggccgttgccgttgggtcggctagtcgcgcgttatgaaattgcgcccgaacgggccttacgtcgtgcctctcgtgcgtcgcgagaattcccgcacctccctggatgacatcagggcgccgatgaggatctcggcgcaattcacatcacacctcgcgctagacaacaacgatgtgggcgattttccggaaccttacgaaaacgaattggttttggcttcgtagcgtggttagccgcccggcccgccaccgatggtgaccaggtcgagcatcaagcttgcgtccactattcgttctcgttgaatgaaccacgcgacaagccgttctagccgcgccgacagatgccttgcaacatcagaattactgcaccggtgacgatggcgacatcggctaggttgaatgcgggccagtaccagtcgcgccaatgccactggatgaaatccaccacgtgcccgcgcaggatgcgatccaccgcattgcccaaggcgccgccgataacaagggcgtaggcaagcgccggcggccatgcatgacgtggcagcttggtgagccaacgcgtcaacagcgcggcgaccgccagcgccaggaacgtcaggacatggcgttgccagccgccggccgagctgaggaagctgaaggcggcgcccgtgttgtaggagcggtaccagttccaccaggggtcgaccacgggcaccgcgatgtgctccggcaacgcggtcagcacccaatacttggtcagatgatcgaccgccaatacgatggcggacacaccgagccacggcagtgcgctcggcattcgcggcgcgcggccctgcgcggtgtgtatctcacgcatgattgcgctctcgggccggccacgccgctcgcagcagcgcgggaacgcgcccggcgtcacgcgccaagagcatgctcgccaacgccagatagagccaggcgatggccgtcagcacgaagatttcccgctcggggttggattggtagaagaacgccagcatcagctgcccgacgaacagcaccgccagcgccacggcgccaaccaggctcagtcgcatgcgcaccagcaatgccagcgcgaacatcgactgagcggcggtcaggaagaattcctcgtgctggcgtgcgcccaatggcaatgaggtcaactcgccggcgccaatgctcatggcaatcggcaacatgcctaccagcaaggtccactggttgatcttgtcgctgatcatggtcgtcaggcccgcacgggcacggccgtccaggacgaacaggatcgcgatggtgaccgccggcgcttcgctggccagcggcgccagccactggatcaacaggaactcgtccatccccaggcgccggccggaagccaccagcgattcggcgaagggttcggccgccagcaggatcacgcctgcggccaccacgcccatcagcaccatcaccgtccagcgcttgccgggcgagaaccgcgcgatcacggctcccgggcccggttcttcgtcttcttcctcttcttcgttctccgtctttgatgtgcgccacaggtacaggaagaacaaggcacccagcacgacgaaatcgaacaggccgatgcgatccttcaggatgatgacgaaggcatacgcgctcgccaacgcaaggaagacgatttcgaccgaattttcgacctgcaacgcaatcccgcgttgccgcgagcgccaccagtgcaaccccaccagcagcggccaggcaagcccgatcaacagccgattggcaccggtcatgttggcggcggcgtaggccacatacccggacgccggatcttggcccgcgcggtaggcgtagtagaagtccaccgcgtattcggggagcaccgtgataagtgcgaccaccgccagcacgaagctggtggcgatgtacttctcggcagcctccgcgccccacgacagcaggaagccggaggccagaatcgccatgccgaacagcgccatgtcgcccagggcgccgacgctgctcccggacacgcgcaggtacagcgcgggcacgacggccagtgctgccagccccactggaaccaagaattctcggactgcgctgtgtgtttgcatgacgtgccagctcccttgggtcctacgcggtgccgtcgatggggaatgcttgctccaccgggctgatatagacccagcccgcgtccggtcgccccgtccgcccgacacggcggaagatttccacggcccgagccacgtcctcatccttgcagaacagctccatctgcacctcattgatcacctggtcgccgaactcgaccgaatactcctgctcgcgcgcactcaaggcgcgcagcagtcccttcacgtcgaacaggctcaggcgctggaagccggcggcttccagcgcgtggatcaggtcggaaacccggttgcggtgcacgaacgccttgatctgtttcatcacacggtctcctgcgggttggatccggccgccttgcgttcggcgcgggtttcgagccattcatacagcaccggcaacagcacaagcgtcaacagcgtcgaactgatcaggccacccaccaccacggtcgccagcggacgctgcgtttccgcgcctacgccggtggacagcagcatgggcaccaggccgagaatggcgacgctggcggtcatcagcaccggccgcaggcgcagcgcggtgccctgtaccaccgcttcgcggaccgacaagcccttgtcgcgcagctcgttgaggaagctcaccagcacaatgccgttgagcatggccacgccgaacacggcgatgaaaccgatggccgagggcaccgacaggtactgtccggtgaccgccagagcgatcaggccgccgatggtggcgaacggcacgtttgcgatgatcagcgtggcgtacttgaccgagttgaacgcggtgtagagcagcacgaagatgaagaagatcgtgaccggcacgatcaacgccaacttggctagcgcccgttgctggttctcgaaggcgccgccccattcgatccagtagccgggaggcaagtgcacctgctgcttgatcgccgcgttggcgtccttcacgaagccatcgacatcgcgaccgcgcacgtccatctggatcaccgcgtagcgctgcaactgctcgcggcggacgaacgaatagccttcggcgatgctgatctccgccacgcgtgacaggggcaccagcgcaccggaagccgttcgcaggggaatgtgacgcacggattcaacggacacgcgggcgctgtcgtcgaggcgcacggcaatatcgaagcgcttgacgccgtccaacagtacgctgaccggttcgccgcccagcccattgcgcacgatcgtcagcacgtcctcggcattcagcccatacaacgccaactcgtcccggttgacctggatgcggatctgcggcttgccgagattggcttcaagggcaaggtcggcgacgcccggcaccgtggcaagggtgctcttgaggcgcccgctaagcttgtcgagttcgcgcagatcctcaccgtagagctttagggcaagcgtggcgcgcacgccggaaatgagctcttccacgcgcatctggatcggttgggtgtagctcggcactacattgggcaccaccttctccagcgtttcctgcatcgccgcttccagctctttgatattccgaccggtggtccactcgtcctctggcttgagggcggtgtagatctccatgtagttgacgtcggcggtgtcgcccttctcggcacgaccgatcatggagagggtggtttccacttccgggaattgcttgaaggctgcggcgatggtgttgctggtgcggatcgattcgttcagcgaggtcgatggaatgccggtcacgcgccacatgatcgagccttcctgcagctgtggcatgaactccttgcccaggaacgggaacagcgccaggctcacgatcagggctgccaccgcactgatcaccaccgtccgctttttggccagggccttgtccagcaatggccggtagatgcacttgatccgggcgaccagccaggtgtcgcgctcctccttgggcttgaggatcatcgacgccagcaccggaatcagggtcaggctcaggatcagcgagccggccatggcgaaggcgatgttgaacgccatcggcttgaacatcttgccttcgaggccttccagcgcaaacagcggcaggaacaccacgataatgatgatgatggcaaaggcgatcgggttggcgacttccttcgccgccgccagcactgccgaagttctgtcgaccttctcgccgtgttcgaggcgttcggccatgatccggaacgcgttttccaccatcaccaccgcgccatcgaccatcatgccgatgccaatggccaagccggccagcgacatcaggttggccgatagtccggcttggcccatgccgatgaaagcgatcaacatcgccagcggcagggtaacgatcaccaccagcgccgagcgcacctcgcccaggaacaggaacaggatgatcgcgaccaggatggagccttcgatcagcgcccgcacggcggtttccaccgccttgttgaccaggtcggtgcgctcgtagatggggcgcagcaccatggtcttgggcagcgccgcccgaacgacctccagcttgcccttgacggcttcgacgacgttttttgcgttctcgccgatgcgggccagtgcctggcccatgacgacctcttggccatcacgggtcacggcaccgaagcgcggtgcaggggcctccgttacgcgggccacgtcgcgcaggtacaccggaacgccgtcttcggacttcagcacgatggcgccaatgtcctcgaccgacttcagcaagcccaggccacggacgaggaattgctcgcggccgacatccatgacattgccgccgacctggccgttattggcggggatggcgttgatgacatcgctgaagcccaggtggcgtgcatacaagcgctgaggatcgatctgtacctggaactggcgctcgccgccgccccaggaactcacgtcgtccacgccaggcgcggtgcgcaggatcaggcgcaccgtccactcctgccaggtgcgcaggtccatgtcggtgacctgttccttgctgacacccggggcgcgctcgaccgtgtaccagtacacctgccccagcccggacgtattcgggcccatgcttggtttcccgtagccttctggcaggcgatcgccgatttcctgcaggcgttcgttgaccagctgacgggcgaagtagatgtccatgtcgtccttgaaatagaccgacacgtacgacagcccgaacagactgaccgaacggatttcctgcaccttgggcaagccggccagcgccgattccaccggcgtggtcagcaactgctcgacatcctcggccgccaggcccggggattcggtgtagacattgacctggaccggggtgacgtcgggaaacgcatcgatcggcacgttgcgcacggcgctgatgccgaggaaggccaccaccgcgaacacgatcaggaccaggaacttgtaacgcagggacagttcgaccaggcgattcagcatggcgcgttacctcgcacccttgtgcgcagttcgcggctcattcttcttctcccaactgggacttgagcatctgcgacttgagcgcaaacgcgcctgcgaccaccaccgtgtcgcccggcttgagaccgtcccggatcagggtccggtcgccgatcacctcgcccgtgcgcaccggcaccggctccagagcaccttccgcgttgcggcgaaagacgacggtgtcaccggccagttgcaccagtgcgtcgtttggcacggcaacctccgtggcggcacggctgtcggcctgggcgcttcccgttgcctcgaagaacacatcgacgaagtcaccgctgtgcaggcgatcgccctggttcggcaccttgatgcgcacgacggcattgcgcgtagcgtcggaggtgcggtgcgcggcctgctgcacggtaccggccaagcgctcgccgtcaaagagcaccaccgcttcctggctagggcggatgcggtgtgcggtacccgcctgcagcttggcatcgacccatacgacggactcatcgaccagacggaacaaggccttgcccggttcgatacgctcaccgacgacgaagtcgtcttcggtgatgcggccagcatgcggcgcggtcagcgtgaactggccgttgacgccaccgctggcggtgccaggcagtccgtaggcctgcgccttggcccgggcgcgatcgaccgcgacctttgcttcggtaatgcgacggccggcgacggcttcacggccaagtgctgaaacccggcgccattcctgttcggcgatgcgcagctcggcttgcgcgtcggaaacatcgacgcttgtcagtgtcgccagcggcgcgccggcgcggacttcatcgccgagcttggcgtgccggcgcacgaccagcgcctccacctggggggtgatcaaggtcgtgccatagcccgtatccaccacttcgcccggagcgcgcagttcctcgctgagcgccgacggccgcagtgtctgcaagcggatgccggcggctttcatcgcggcatcgtccatcttcaccgaactggcggcttcttcttcaccgccttcggcgtggccctcaccacccgcctgttcggaattcgcggtttcggccccaggcttggccgcgcctgcatcgggggatttggaacaagcggccagcgccagcagcaatgcggcggtcagcggcagggttaacaaacgcatgcgatccatcgaaatctctctcatggggtgccttccataccggcccagcgttcaagctgaccggtggcggcgaggtagtcggcatagctgcgccacaggcgcgcctcaagttcggcaccagcgagctgggtgtcaagggtctgcttgagctgcaacaggtaatcggcggtggacagttcgccttcctgccagagtttctccagcaagctggcgcggcgctccacatcggtgcccctgctaccttgccagcgcgaccaggcggactgcgcggcaccgtagctgccgatggcgcgctgacgatccgctgtcagttccattgtggtgcgttcagccaccgctgcggccacatcggcctcggcggtggccgccgctacttcggcacgatatgagttgcggacgaacaacggaatgctgatcgagaaaccgacaatgttgtcagtcaccgggccgatgtccttgcgtccgccgcgaacggccagtgtcgggtttgctatgcgatcacgacgcgccaccgtgacatcccgctcggcagccagcgccgccgcatgtgcgacctgccactccggcaattgctcgacgccttccgcaggcgtaacaggcggtggcagggttttgctgggcaagagtacgctcgcaaccaattcggggctgccgcccacagcccgaaagcgcgcttcggcttccccgcgttctgcaatcagctgggattgctcggcttgcgcttcgtcgtgggcgagttgagcgagatcccgctcgattccggaaatgtcgtcggctgcgaactgcttttcggccagcattgcaaatcgggacaccagttccaaacggcgctcgccagtacggaaccgctgttgtgccgattgcagatcagcccaactggcgaaccattgtttgacgaaatcgcgacggtgcatttgcgcttccgccgtggcctgatcgacccgcgctgcggctgcatcacggcgtacgcggcgtttgccactgatatcaagcgtgaggctgagtccagcagtcgacgtacgttcgtcgccttcttcctcgcgggtcagctcgacttcggggttgtacagcggctgtcccgctgctgccagccgtgcgcgagcggcagcgagttgtgcttcggtggcacggtaactgggatggcgctgccaagcggccagaagcgccgcgcggaggggcgccggggccatggccccgggcgcttgggcggcccatgcctgtcctgccagcaagcaggcgaacagcgcgatggccagccaggcgacagcgcgtcggcgcgtcgaacgaacaaggtgcattggaaggatcctctgaatcgacaacattcctcgacgctccgcgccgagggggcaaaccacaggccggttaggcgatcggtggcctaagttccaaacaagacgtaatgctgcgccgcacgccggcgagcagtaccgccacatcctgcggtgggagggggaagctgaagaaggtttcgggcgccataacggcggcgtggtggcaactgcagtgcgaacacccgccgggctccttcctcgacgcaccctcgccatcgtccgctggcacattcactacggtctcgagcgaggccttcgtaccatggcccagatcaacgaaatcatgccgggtacacgcggcggcagcgccaatcttcatgacgaagatcaacagcaccagcacaaccaaccgcgcggaagtgcgcaagcgcgcaagcaaggcacgggacgcggcggacttcaaccctccggcatggccagcaacaggtgagctttgaaatatcattcaggatgcctgtcgcctcgccaagcctatagccgcaatgcgaccgcaatggcggcgttgacgaacacgcccgtgagggttcagtggacggctacctgaatccccaacacacttagatccgtgcccgccccccaaaagatagccgtgcacgagcgcatggaaggtttcaaaacaggagaagaacttagcgacttccttcgaccgtgtcatggcgtcctcctctcacttgcgggccgaagataacttccgcagcaagcgcatgccgttgccgacgaccagcaggctcgcgcccatgtcggcaaacaccgcagcccacatcgtagcctgaccagctaaggtgagcaccaggaacaccgccttgatgccgagcgccagagcgatgttctgtgccaaaacccgggccgtggccttcgacagcccgacgaaggcgggaatcttgcgcaggtcgtcgtccatcaaggccacatcggcggtttcgatggcggtgtcggacccggccgcgcccatcgcaaagccgatatcagcccgcgccagcgccggggcatcgttgatgccgtcgccgaccatgccgctggtgccctgtgcggcgagggcttccatttcccgcagcttgtcttcgggcagcaggttgccctgggcccggtcgatgccgacttcgcgggcgatggcctgcgcggtgtgcggattgtcgccagtcagcatcagggtcttgacgccgagtgcgtgcagttcggcaatggcctgtcggctgctgtccttgaccgtgtcggccacggcgaagagggcctgcacgccatcgcttgccaccagcgccacgacgctcttgccttgtgtttccaagctgctgaaatgcgcttccaacgctgccgagctggcacccagctcctgcaccagccgatggttgcccaagtggtaaagcacacctgccacctggccgcgtacgccgcggcccggcaaggcggcgaagtcctcgacttcacgcacggtcaccgcatcgtcctgtcccgccacggcaatggccttggagacggggtggtcggagcgagcggccaagctgaccgcgaccgcgcgagtcaggcctgggtccgcctcgccccatgcgacgaagtcggtctgcttgggtttgccgtgggtgatcgtcccggttttgtcgagcgccagccatcgcagcttgcgaccattctccaggtacacgccgcccttgatcaggatgccgtgccgtgccgccgcggccagtccgctgacgatgctcaccggggtggagatcaccagtgcgcaaggacaggcgatcaccagcagcaccagcgcccggtaggtccattccagccacgccgcgcccatcaacaggggcggcactaccgcgacgccgatggcgacggcaaacaccagcggggtgtaccagcgcgcaaactggtcgacgaagcgctgggtgggcgcacgattgccctgcgccgcctccaccgcgtggatgatgcgcgcgagggtggaatcattggccgtggccgtgacccgatattcgagcgaaccggcttcgttgacggtgccggcgaacaccagatcgccctcggccttttcgacaggaaggctctcgccggtgatcggcgcctggttaatcgtggagcggccaaggaccaccacgccgtccagcgcgatgcgctcgcccggcttgacccgcacccggctatcgagcgcgaccgtcttggcatccgcctcgacccatcggttgccgtcctgcagcaccgtggcccgttcgggcgccaggtccatcaagccccggatcgcattgcgcgcgcgatccagcgatctggcctcgatcacctcggccagcgcgaacagcaccatcaccatggccgcctccggccaatggccgatcagcatcgcgccggtgaccgcgatcgacatcagggcgttcatgttgagattgcggttcttcagcgcaatccagcccttcttgtaggtcgacaggccgcccgtaccgatcgccaccagcgccagtgctatgaccagccacgcaggggccccgagccacgacatgacctcggcgagcagtgccgccgcgccggaaacgatcaacggccaccaggctgtccgggtctgcaccggtgcagtcgaatctgcgctgccggccgtggcgaccgcttcggcctcgaagcccagcgacttcaaggcggctagcacatccgacaagacaccggtcgcgtggcggacggtcagggtgcgttgcacgagattgaaggccagcgcgtccacccccggcatgccactcaacttgccgcgaatgaggctttcctcggtggggcaatccatgttcgcgatatgcagcgccgtttcaacggcagacgccgtcgtctccaatggcaccgcctgcatgccgatcgccgccagcgcgtcttccacgggggccagcgcaggcaactggtgaagcactgtcagcgtgcgctgcaccaggttgaactgcaggtccgtcacgccgggcacttggccgagcttgttccggatcagcgcctcctcggcggggcagtccatgttcgcgatgcgataacgcataacctggagtgaaggcgccggaagttgagccatggtcgccgagtcaccacagctgttgcaagacgtgctcattgcgcgcggtctcccttgacggcttgcgggggcacgcgagagttgcgcgcattgtaataaaaactgccgatagcgatcaccgccacggccaactgcgccagcagggattgccaggaggggtacacgcccagccaatcgatacgcggcgcggcgaccagcgcctgaccgacccagccagcttcctgcagcgccgcgatgcccttgccgaccagcacgacggcgagcacggcaatcaggatcgaactgatcgagaagaactggccaatcggcaggcgcttgctcatgcgcagcatccagtacgccaccccggccaacacgacgctaccggcgaccagcccacccagaatcgcggtgctgtttttctggttccacatcgcgatgaagaacaggatcgtctcgaacacttcgcggtagaccgcgacgaaggccagcatgaacaggaagaccgcagagcgccgggtcagcgcagccgagaccttggcgtgcaggtactgctgccaacgcccagccaggcttttctggtgcatccagatgcccacgctgagcagcaccactgcagcgaacaacgccgacacgccttcggtgacctcacggttggcgccgctcacatcgaccagatgggtcgcgatggcccaggttgccacacccgccagcaacgccccgacccaaccggcgtgcaccgccggcaggacctcgcgacgttcggccttgcgcaggaaggcaatcatgccgatcacgatcaacaacgcctcgatcccttcgcggagcaggatggtaaagctgcccaggaacgccgtggtgcgatcggtgtgcgcatcccgcaagaccgcctcggcgcgatcgaacagcgcgctcacctccgtcgcctgcgctgtcgcatcggaggcaggaacgcggcggccgatggcatcgcgatagcgcgccatggtggtttcgagcccacgcatcagcgcgttgtcccgcgcggcgagtgtgggctcgaccggttcgacgccatccaggtacgccgacaaagccgccgtcttggcctgcccggcatcgcccgcctgataggcgcggaggctctcggccatccgttgccgggccagtgcgagcgattggactgctgccacgcccgaagctgcggtctggacggcctgcggctgcccgcgcaggtaagcgatgatggcccgcgcctgcgcgtcctgactgccggcggcgatcagatccgcctcgctggtgcgggtcagcgcttccagcgtgggaaggcgctggtgccaggccggcgcgtcgcgccacagcgcttcgccctcggcccgcatctgcggcgaatgcgacaagctgccgacgtagaacgccagcgcccagcgatcggcttccggcagggacgagaagccggtcatggccgttccctggatcccttgggaaatcgcttcgtacaaggcgaagggactgcgctgggcggcgcgggtggcatcggtgaaggcaatgggcggcgggtccaagctcgccgcagccggcccatctccgtggccggccggaccgtggcaggcagtgcattgcgcggcgtagagctgcgccccccgggccggatcgggcggcgtcgccggcacggcaccgaccgggtagttggccagcaggccgtcggccagccgatgcgctagatcggcgacgtgcttggcgtcggacttagactcgacagcggttaccagctgatcagcttgggcgatcagaccggcctggccgggcgtcgacggcagtgcggccaattgggttcgcaccgcccctgcaaattcacgcatctccgcgtactcggcctcggacgcgacgctgccggatttcacggccgtgccatagtcgacggccacatagtccagcagctgccaggtctggcgcgggttgaccgcggacggcgcggtggcgaaggctgggaaggacagccaagccaataacgcgatcagcaggcaacgacagagggagttggtcacggagagcgcctaggtgaagggcaataaacggcaatgggaaccagttgcaacggtgagcgtacaccccgtacctgctacggagtcaagggcaggattccacgacagggcaacctcctctcccgtgcgccatagcccccggaggcctcaaagggtaaagtccgtagcagctatagggtcaagaggcgtcgatgaagattagcgaagcggccgaatccagcggctgccatctggaaaccattcgctactacgagcgcgtggggctgatgcccaaaccgcggcgaaccgccagcggttaccgcgagtaccgcgatgacgaagtggacctgctgcgtttcatcacccgcagccgcgacctcggcttcagtctggatgagatccgcagcctgctacggctggaaagcgaccgcacgctctcctgcggcgagatcgatgcgattgcccgcgagcatttgaccgatatccgcagcaagctccgcgagctcaatcgcattgcccgggaattggaccgcacgatcaacgcatgctccggaggcgcccggggccagtgctcgattctggccaccttgcgggagccgatgccgacctcgcgggtcaaaacgacagacgtgcgtcggaagaggtcggcatgaaccgtctggtgatgcgatgccttggtgggaactgcccatgagcctgcgaatcgcattggtccaggcggactttcccgtcggggacatcgacggcaacgcagggcgcattgccgagcggatcgccgaggcgcgcgatcgctatcacgccgacctagtgctgtttccggaactcacgctgagcggctatccgccggaggatctgctgctgcggcggcagttcctggccgaatgcgccgatgccgtgcagcgcatcgcccaggaaacaaccggcatcgtcgcggtcgtggggtggccggaagcggcaggcgctgtcgtctacaacgcgatcagcatgttgcgcgacggcgcggtggcggccacttaccgcaagcgcgacttacccaattacgccgtcttcgatgagcgtcggtactttgcggtcgatccggacagcggggcgtgcgtgttcgagcttcagggcgtcaccgtgggcttgctgatttgccaggacctgtgggggctggaaccgacgtttgaaaccgccgcaaccggcgcgcagctgattctcgtctccaacgcctcgcccttcgagcgcgataaacacgcggagcgggacgcgctgctgtctgagcgcgcccgcgacaatcaggtcgcactcgcttacgtcaacctcgttggcggccaggatgcggtcgtgttcgacggagcctccttgctggccgatgccgatggccaggtgcatccggcggccatcgccttcgaggaacatgtgctggtcgccgatttcgatccggcctcacgcacgttcacccaggtctcctggccaatcgacaccgacgtcggccgcgacgctgtggcctggcgcgcgatcgtgtgcgggttgcgcgactactgccgcaagaacggcttcgaccgggtttgggtcggcttgtcgggaggactggattcggcggtggtgctggcgatggccgtggatgcgctggggagcgaccgcgtcaccgcggtgcggttgccgtcgcgcttcaccagcgcgttgagcaacgacctggcggcggcgcagtgcgcgaccttgggcgtggcgatgcggacggtgccgatcgacgccccgttccagggctttctcgacacgctgagcgggctgttcgcgggtacgacggttgatgcgaccgaggaaaacctgcagtcgcgcacgcgcggtgcggtgctgatggcgctgagcaacaagctcggcggattgctcctgaccaccggcaacaagagcgagtacgcggtcggctacacgacgatctacggcgacatgtgcggcggttacgccccgctcaaggatgtctacaagaccgaggtgagtgcgttggcccgctggcgcaataccgtaggcggcgcgccggtcatcccgcccgaggtgatcgcacggccgccgacagcggagctgcgcgagcaccagaccgaccaggacaccctgccgccctacgacgtgctcgatgcgatcctgttccgtcatatcgaccaggaacaatcgcgcgaggaactcctggcggccggattcgccgccgccgtggtggacccggtgctggaccttgtgcgtcgccacgaatggaagcggcagcaggcggcgccgggtccgaagatctcgcggcgtgcgtttggacgtgaacgacgctatccgatcaccaatgcctatgcccaggcgctctccacgcggtgatcccttgagcagcgtcgaccgctaccgagaagccgccacccgcgccaacacacggcgcagctatgagtcggcggttcgccacttcgaggtggaatggggtgggcatctgcctgccaccgccgacagcgtggcccagtatttggccgattacgccgagcagttggcgatcaatacgctcaagcagcgcctggcggcactggcgcaatggcacggcgagcatggcttcgtcgatccgacgcgatcgccgcgcgtgcgccaggtgctcaagggtatccagacgttgcatccggccgttgagaagcgggccgaaccgctgcaactgacccagctcgcgcaggtcatgacctggctgcacacggccgcggcgaccgcggaaggtcgcggtgaccgagcggcgcagctgcggcatttgcgggattgcgcgctgatctcgctcggattctggcgtggctttcgcggcgacgagctgatccatctccaggtcgagcacgtgcgcatcgttcccggccaaggcatgacctgctttttgccccgcaccaagagcgatcggcgcaacgaagggcggatcttcaaggtcccggcgctgtcgcgctgctgcccggtatcggcgacggccgagtggatcgccgtggccggcctgaccgaagggcccctgtttcgggcgattggtcggtgggcccaagtgtccgaagacgctttgcatgcgaacagcctcatcccgctgctgcgtcgcgccttcgccgcggccggattgtcggcatctgacgcctacagcggacactcgctgcggcgcggcttcgcggcctgggccgatgcgaatggctgggatgtgaagacgctgatggagtatgtcggctggaaagacatcaaatcggcgatgcgctatctcgatggcgccgatccgttcgcgcgcgatcggatcgaagcaggcctggtcttgccggcaccggcaccactcgcgttgccggcgcctgtggcagtcgagccgccgacactctccgtggacctgagtctcgtgctcaccccgtttacgcctcgcggccgcgggccccaccgggcacggcgtttgatcgaggatatctgcctggcgccttacggcgcccagcgttccgacgcagatggcacccgttaccggttgaccgtgccgacagtcgagccagacgtcttggatgaagcgatggcgaccttgatcgacgacatgcatcgcatcgccgacaaccatcgctgtttcctggaggcctcgttgcgcgctggcgatgggcggcattgggactaggcacgccaccttcttacgttgaggagccttgttgacggatgacgaccctgcacgagaccgcgtatccgcgcctgaaaccggacccgaccctcaaggaactgcaggacatctacacgccgaccgaggccgagttggcctttgttgcggccaccgcaacgcgacccacggcccaactggcggtgctggtccacctgaaattgttccagcgcctcggctacttcacgcttttggccgatgtgcccgagcgcatcatccagcacatcgcgcagacggccggcgatcgtcgttcggtgccgatcgagcaattgcacagctacgacagctctggcgcgaagcgtggccatatcgcgaagctgcgcgactacctgcgggtgcgcgtgctcgatcccgacggccgcacctggctggcgacggttgcggaaacggcggccgagaccaagcacatcattcccgacatcgtgaatgtcctgctagaggaactggtccatcaccgttacgagttgccggcgttcagcaccctggaacgtctggcgatccaggcccgcgagcgagtacacgatcgctacttcggccgcattgccgatgcgctgacgcccgcggtccgcgcgctcatcgatgacctgctggtgtcgcccgacgacgccttcagcggctggcaggcactcaagcgcgagcccaagcgcccgacaaacaaggaggtccgcttctacctgcagcacatccgccggttgcaacacctggccgaacagttgcctgcgatcgacgtgccggtccccaagctcaagcagtaccgggcgatggcgcgggctctggatgccagcgaactggccgaactcaaaccgaccaagcgctatgcgctcgcggcgatcttcattcgcgctcaatacgccaagaccctcgacgatgcggccgacgtcttcatccggctcatccagaagctggaaagctcggcgcagcaacggctcgtggcctatcaactggaacacagcaagcgcgccgatctcctgatcggccagctcaaggtcatcctccaggcctatcaggtcgagggaaccgacacgcaacgggtcgatgcgatcggcaacgcgctcgtcaccgaggtgccggtgctgctcgccgagtgcgaggagcacatggcgtacgccggcaagaattacctgccgttcctgttgcagccgtacgccacgatgcgcccgttgctgctcaattgcctggagatcatgggcctgcgctcaactagccatgatgccatgatggagcgcatgatcgcggcgctgcaggcgctgcgcggtcaacgtcgtgagctgatcgaggccagtgccctcggtctggatccggagggcgatttcacctggttgtcgagcgcctggcgccggcacgtgttcggcaagtccgccacgctggccgggcgcggctggctgcatcgcaaatacttcgagctggccgtgctggcgcagatcaaggacgaactgaaatccggcgacctgtatatcccgcatggcgaacgctatgacgactaccgcgaacagttggtggacgaagcgaccttcgcccaggaattggaggcctacggcgaagtctccgggttgccgaccgacgccgcggtcttcgtgcgcggactgcgggtggaactcgccgccttggccgatgccgtcgaccagcgctttccggagaacgtccatgcagaactggtcgacggtcgcctgatcctcaagcgcctgcaacgcacggaagtgtcccgtgccatcgtgtccctcgacggggtgattaccgagcggttgccgccgaccagcatcgtcgatgtgctggtcgacgccgcgcactggctgcaactgcataagcacttccggccgatcgccggtaccgacagccgcgtggacgagttgctgcgccgcgtcgtcacgacgttgttctgctacggctgcaacctcggcccgacccagacggcacgctcggtgaaaggcttcagccggcgacagatctcctggctcaacctgaaatacgtcaccgaggaaaccctcgacaaggccatcgtcgaggtcatcaatacctacaacaagttcgagttgcccggatactggggcagcggtaagagcgcctccgctgatggtacgaaatggagcgtgtacgagcagaacctgctgtccgaataccacatccgctatggcggctacggcggcatcggctactaccacgtttcggacaagtacattgcgttgttcagccacttcattccgtgcggcgtgcatgaagcggtctacattctcgacggtctgctggccaatacctccgatatccagccggagatcgtgcatggcgacacgcaggcccaaagctatccggtattcggcttggcgcacctgttgggcattcagcttatgccgcgcatccgcggcatcaaggatctgacgttcttccgacccgagccgggtcgctcttacaagaacatccaggcgttattcggcgagagcatcgactgggtcctgatcgaaacccacctgcacgacatgctgcgcgtgaccgtctcgatcaagctcggcaagatcactgcctccacgatcctgcgtcggctcggcacctatagccgcaagaacaagctgtacttcgccttccgcgaactcggcaaagccatccgcaccatgttcctgctgcgctacatcgatgatgtcgatgtacgcaaaaccattcatgccgccaccaacaagagcgaggagttcaacgggttcatcaagtggtcgttcttcggcggggaagggatcatcgccgagaacatcctgcacgagcagcgcaagatcgtgaaatacaaccagctcgtggccaacatgatcatcctgcacaacgtggagcggatgacccgaatcctggccgagctgcgggacgaggggatgggtataagcgccgaggtgctcgccgggctgtccccgtaccggaccagtcacatcaatcgctttggggactacacactcgacttgagccggaagatcgcgccgctcgattattcgagccggatcctggcgagctaggtcggaagtggggacctgccggcttatgattttggcgactcttttgaggctaataggccacttcgtggcctcagcaacgcagtaggctcagaagcaaaagcacggcaacatcaagagcttaaaaggcgaacggctgttttttacatgaatccctgccgaccctcaggtggcgcattgcgagccacagcagcggcagggcaatcagcagtggggccagcagcaaccacccgcgcgggggcgacgcctgcatccagtccagtgcattcccggccgcggcaggcagggtctggcctgcccataggtggagcaggcctgcgtgctcttccagtgtgatctcccgcaatgcctgttcgatgcgcccaagcagttgctggtcttcccggcgaaccagcaggtaaaggtcggtggagaagccgctatcgaacggctgcaggcgcaggctgccattgaaatggcgtcgaaccagggggcgcagcgtgggctccagaccaatcgccacgtccgccaggccggtttcgactgccgccagtgctgcatgccggtctggcagctgccgcagccggacctgcgggtgatgcgcgtgcagccagctggcgtagggcccgccttcaacgacggcgatgacccggccgtcgagttcgcgcatctcccgtggcagccactcgccggcgcgtccggccaacagggtggcgccgccacggaacggggtggacgcggcaaggccggggcagggcagcgcctggtgccttgcgccgccaaacaccatgaccaggtcagcctcgtgatggcatacagcgaggattgatgcggcggttgtcgggtaggggtgttccaggaaacggaattgggcgtgccgcgccaccaggttggcatagccatgggcgagcgttggcggtgatgacggatcggccagggccgcgggcagggggcgcagggagggagtcgtggcgacccgtacagtgctgcccggcagccagcgtggcgagcggatatcttcggccgaggcagccggcaggagaaggagcgccagcagccccgtggacaggaagcggcggcgcaacggcggctggcgcctcacggtgtctccagtcgttcgcgcagtgcgtagatttccacgtcgctgcgcaatcccagcttgcgcagcacagccaccttctgcgtgctgacagtcttgatgctgcggtgccgccgcaatgcgatctcggagaccgtcaagccttccaacagcaggccgagtacttcgcgctcgttgcggctgagctcgccgcgatcgccggccagcctgacgtccggtggaacccgggtcaggccctgggaaacacgtacgatggcgtcggacaatgcagcaagcggttcggccttgctgacgaatccgttgagtccggcatcgatcaggctgttgaggttggtggtggggcagagcgtggcgaaggccagcaatggcgtgcgcgggaattcccggcggagcagcgcaaccagctcgaggctacccaggtcgtcacgggcaagcgtgagatcgatgatggccacatccactggtgtgcgttgcaggctgcagagcagttcgttgctgcaaccgtggctggcgacgatgtcgaagcggagatcgcctgacaggtgcagggcggtgccgcgacggacgacttcgtgatcgtccaggagcgccaggcgaagccgacgcggtgcaggaaatccattcatgcgcgggaggtggtcggcgcccatgggcgtggccgccattctggcgccgctgtcgcgtcgaacatcgaattcgttgcgtttttacgactattcctaaagatcgatggatgcagttgatcggccggggcttacgcattcgtgacgtaaatggatggggtgctgcaggcgtcccgtcgtggctgccggaaccattaatgtgacgcgtcacgccggcgtgaccctgcgcccctgacctgactggttgacgccgtcagggcagggcagggctatcgagtctgcacgcgggggatcgacatgcgacccaggaactgcgccggggtgatgcggggcaactgtttggcatgggcgtctgagaagtggcgcaggccgccccagagtgcggtgtctccgatcaggaagcagcggtgctgggcacgggtgacggcgacgttgagcagattgggcttgctggaggcccagtgcgccgcgcccaccgtgtccgtgtcgcagcccaggaccatccagacaatgctttcctccttgccctggaaggtgtgcacggtgccgacgcgctccctgcaccacgtgcgcagttcggtggtgcgtggcgcctgcgtgccgggtggggcatccgggccaagccaggcgtcctggctccgcagtcgctcgagcagggcattcttgatgcgcttgaagggcgaaatgatgtagaccgggggaaggcttccggtgctgtggtagagcgcggccaacgcctgctgcaccaggtcgatctggcacggcacgacctgcttgtcgctggtgcggccgggggcgtgtacccaggcgctgctgccgatgtccaggctgtcggtgggtggccgcgccgcactgggttcccaggggttggagaagatcatcttcccctcgtaggcaatcgtgttggcaatggagaacatcggttcgacgcagcgacgatgcacgcgcagcggactgccgatccagagcggcgagccgccggactccatgcgggcaccgagcgggttggcctcgtcggccagtacctgtacggaggtcttgtcgggcgagacgttcacgcctgcaggcagtgcgctggttcggcccagcgcctgcagcaacttgaccggcacggtgaacaccggctcgatctgcagcggatcacccaccacgaccgcgcgcctggagcgcagcagtgcaccgaccgccgcctgcggcacggcctggccagcttcatcgatgaacagccagccgatcgagtccggccccaggtggcggaactggcgtgcgaccgaggcgaacgtgctggagacaaccggcacgatcatgaacaggctctgccagatggccagcgcatcgcgtggctcctgcagccgcttgccactcagcaggtggcacagtgcaatgacgttctgggcgaagccgccgcccttctgcaccacttcgtgcagccaggcctggtgaagctgcagtgccgccacgaagaggttggcgcgctgctcgttgagctgctcgctgttccagactcccttgatctgccagtcctgaccttccagttcggccgcgttggcgggatgggacgcggtgccgaattcggctttcagttgttcgagctgttgcgtcattccagcccattgctgcgcccgtgcctgcgcggcggccgatgcctcggccagggtgctcgcggttcggcccaggtgctgttgcgccgtatcacattgcgtcccgagttcgagcccgcgctgggtccatcggtgttgatgatctgcgttctgcaccattgcggccgcatggctgtgcgcgcgctgccggtcaaagatgcgggcccaccagccaggcttctcttccctgagcaggatgcgttgcgccttgagcagggcgagctgttcatcggatctgctgcgctggccctcgagtgcacggcactgctgtgcagcttcctcatgcgcgcgctgtgcatcgcgaagctgagaagtcgtttgccggcagaagctctcctcatcgttgccgctgatttcacggctgagcgaggcaagccgatccagcttttcgaccaggccattgacgatcgcatcggccttgccgaacgcctgcctggcctgctggaagctcatggctgctgggttgtcccgccactcccagagcgactggtggcgggcgcggtcgtagcccttcggtgcgggggttttgccatcttttggggcgctcctgctgatggcccgcacaagtgcctcgcggttggccttcctgcccagcgcgcagctgatcaacccccaggcatcgctgtctgccgccggtcgttcataggcgcccctgccgttccattcgagcaggttgcgggccagtggccgcaggtagtcgaaggtcacgtcccctgtgctgttgcgccagcgcgaccctccgggcttgcccagtgagcggctcttcggcaggtcacgcgaaatattctccacggcggcattgttcgacgatgcgaccaccatctcgaagccggtcaggtcggccttcagtggcgagaccctgcacggcttctcaccttcgaagttcacttcgcgggctgggccgagcgcagcggctggcgtcgcgtactgtgacaatgcacgtgcacgccgcacgatgttctcagcgaagacctcacgcaacagcgtggtcttcccggttccgggcgggccattgaccgagaagatgcctgaatcgcgcacctgctcgaagatgctgttcacagcgaactgctgcatcaggctcatcgtgtgtgcaggatcgccgggccagtggccccgattgatgtggcgcgggcgcagccggtcggcaatcagcgcatggccttctggggtgtaaaggtcttcgcgtcggctttcaggcaatgggctcagataggcgcgtagcggcgcactggccttgccctggtcgagtgcgccgatggcccgcgcgatatcctcgacgaagaaactgttgaggatgctgatctccgcgtcctcttcgggctgggcctcgtcgtcctcgacgtcgtccgcttccgccgttggctcgttgtccggccctgggggtgtggcttttgctgcccgttccggcttcggcttgtcttcaacgcttttcgcccggatgaccagcagcggagcggacgcgtcgcccgcggaaaggtcatgacccgaccagttgcacaggatgtcgagcaggcgcaacaggtcgtcggggctgcagggcgttgggccctcaccctgtccggcgggggtggcagcggcgctgcggaacgttgctacgtcgcgcttgagtgcttcaaggcttgcctggaaggcgtcgaagtccaggccctgcaagccacgcctggagatcgtgcccagtgcccacggaacggtcgataccgagatttcacccagctgcagcacgccctcggcgcttgcccgcaggctggccgcgcaggtcaggccttccagttcggcccgttcgtcctgttccagcgactcgtctccgcttggcgtctcagccagtacccgctgggtgatatcggccagctgggctttgtcgaatatgccgaggtagacatcgaatccgctcagcctgcgaccgaatggcaggggtggggaccacagatccttcgggtccaatcgctcgagctgatccctggacagctgccgtacgctccagtccgcgtccttcgactcaaggacctggccctgcagatcgtagggtatgaagaactcaaccctgtgccagaagctgaggatcgcgcgatgactggcctgcaacgtgttgcgtcgttcttccttcaactgcctgttccttccattgtgaaatcggccacgaccggaatgcacccttcgtcggccattgtggccggcgcgcacagccctgcattggccattagcggccgccgcggtcgagtcttgagtgttcgcgaccccagcgccagctactgcaggcagggcaggtgcggcgtcgctgtacgcacgggtccggcagcggctgcgcgcgtgccggatgaacaatgcggcagcggtgatgaatgcgacatccggcgcaagcagatgtcgacacgccctgccgtcagcaggtgctgcgccgggtgtgagcgatggctcagcgcagtgactgcggcacgcgcctcagctttgcggtgtcgtaacccatggccgcgatgcgctgcacggcctgctggtagtcgctctcggacacctgtggcgtgcgtgccatgtaccacacgtagtcgcgcttgctgcgcgcgacgatggtctggccgtagtcatcgcgcagccaggcaatcacatactcggcctggatcggccagatgaactgcatgccccagagggcgccgttgccgtccttctcgacccgtccaacagggtgcatcgacttctggggggcgtcgaagctgcccttgcgataggtgaaggtggtctggatgcgcccgtcgggcttcaatgcgtagctctccaccgcgtcgaaagcttcgcgctccggccatgaggggatgtgggcgatcacataccagtcacccatgaaacgtggcacgtccactgagggcgggcggggcaggggacgggtatcggtggaactgcagccggaaccaaacaggctcaatgccagcaggggaagcagcgagcgcatgcgcatgtcacacctcaacgggggcggaacagatagtgggcgaccagccactgctggccgtcgtcgtagccgaacagctcggcgcatgccatccagaacatgcgccagcgctgccaccagatcttcgcggcggcctggccgtaggtcgcgaccagcaccggcatcaccgcctcgcgtgctgcatcctggttggccagccagtggtcggccgtgcgctggtagtgggtgccgtccagcaaccagcgctggtcaagccgcaggtcgcgctggaaatgcagcagtgtgtcggccgccggcatcaggccaccagtgaagaaatggcggcccatccagttgtcgccgccctcggtctcgaacgggtacatcagcgtgcggtgggcgaagatgtgcacgaacagcgcgccgtcgggcttcagccactggctgatgcgcgccagcaggcgctcgtagttgcgcacatgctcgaacatttccaccgagacgcagcggtcgaagcgtgcggttggcagctcgagctggttgacgtcgcgggtgatcacctcgacgttgtgcagcccccgggcctggcactgcgccatgatgtgctggcgctggctgtgcgaattggacacggcggtgatcgcggcggtgggatagcgctcggccatccacagggtcagcgaaccccagccgcagcccagttcgaggatctgctggccatcggccagtccggcgcgctggccgtacagctccagcatggcgtcctccgcctggtccagcgtttcgcgcccggttgggtagtagcagctgctgtacttcaggcgcctgcccaggcaggcctggaagaaggccgccggaacctcatagtgctggcggttggccgcgtcggtatgcagcgcgagcgggctgtcggccagctcggcgatgcgacggctgaagcgtgcggactgtgcttcgataccgcccagcatttcctcgtgcaggcgttgcgcgcacaggcgacggatgccggcgcgcagcgcggcatcgggaaccaggccgcgttcggcccaggcgatcagcccggtttccgcgtcgtcggccggggtcagtgacggaatcgcgctcatgcggaatgctccttggaaggacgagggaaccaggggaagaacatcggcgtgctgcgctggtaggcgcggtaatcgtcgccgcggctgcgcagcgcctgcttttcggtgaacggaatgccgctcaggtagcgcaggaacacatacatcagcagcgggccggaccacgccagccaccacagcggcgagccgaccgcgagcaggacatagctgaaccagtgcagccactcgaagaagtagttcgggtggcgggagtaacgccagagcccgtcgcggcaggtgcgaccctggtttgcaggatccgcgcggaaccgggccagctgatggtcggccaggctctcgccgccgacgctcagcagccagacgagtgcggcggccacgacccacaacgtcatgctggtctgtggattggcagccaccgcgacgaagggcagggcgaacagcacgaccagcagtgcctgggccatgaagaagccgaagatcttggcttgatgcccttgccagtaatcgcgcagatagcggtagcgaccgtcttcctgttcgtggcggacccgatgccacaggtgcagtgccagtcggctgccccacaggccaccgagcacgcccagtgcaatgcgtggcgccgccgcaccatcgccgagccacgccagcaacagggccgaagcacccacgcccttggcccagagcacatcgtccacgccgatgttgcggtggcgccgctgccaggcccagccccagctcatcacaagcacggcatacagcagtacccacaccagattgatcatgacggcgctccggccaagggcggcgggatggtgcgggagccgcgacgagcggccatgcacagcagcgaaagcgcaatgctccagcccacccccagtaccagcaggccttgccacagcggcgtagtgaatcgaaccgcatcgaaaccgcgcgctgcggagagataggccagcggggccagcagcaggccgaacgcggctggcagggcagggtggcgcagcaggaagcgcatcgaagtggtcagcgtcatcgcaaacgcggcccacaacgccatgatccaaaggggtggcgtccagcccagcggggccgcggcgtagcgtacggtgccgctggcggcggcactggcgtcgaccagccacgcgcaggccagcgccaacagcatcagccgaagatccagccgaggttgcggcgaggtcagcagctggctgccgatgtagagcgacgctgccagcagcgccggccattgccagccgcgcccggcgccggccacggcgcacagccagaccagctggttgccaagcagattggcccagaaccggcgcacctcagccgccttgacccgatgcgccagcgggacgatgcccggggcgcgccagcagcagatgcgaaacgccgatcgaacgctccaggaagccgccctcgcaataggccaggtagaactcccacatccggcagaagcgcgtatcaaagccctgtgcctgcacagcgggcagctgggcaaggaagcgttggcgccaggcgcgcagggtcagtgcgtaggagtggccgaaatcctgctgggcgaccagctgcaggtcactggatcgggtcttggccgccatgatcgcgttgatcgacggaatgaagctgcccggaaacacatagcgcttgatgtagtcgacgctgcgccgtgcctgctcgtagcggtgatcttcgatggtgatggcctgcagcagggcgacaccatcgggcttgagcaggcgctgcagcgttgccatgtaggtgtccaggtattcggcgccgatggcttcgatcatctcgatcgataccagcttgtcgaactggccctgcaggtcgcggtagtcctgcatcaacagcgtgaccttgtcctgcagcccggcgacgcggacgcgctcgctggccagtgcatgctgctcggcggagatcgtggttgtggtgacgtggcagccgtagtgctgcgccgcgtgcagcgcaaaaccaccccagccggtaccgatctccaccacgcggtcgcccggcttgagctgcagctgctggcagatgcggtccagcttgcgccgcgaggcggattccagcgactcgccctcttcggcgaacagggccgaggagtacatcaggtccggtgacaggaacagggcgaagaagtcgttgccgaggtcgtagtgcgcggcgatgttgcggcggctgccttcgcggctgttgcggcgcaggcggttccagccgcgcagcagccagcctcccacgcgcgccgggccgtgttccatgctgtcgagcagatcgcggttgcgcaccagcagccgtatcagggcgaccaggtcgtcacagcgccattcgccatggatgtagctttcgccggcgccgacgctgccctgggccgccaccttgcgatagaacgccgggtcctcgatggtgacggtgacatgcagctcaccgcgggcatcgcccaaccagacttcgcccagcgcgtcgcgcacgcacaggcggccgtcgcgcatcggggcgagctgggccagcaggcggcggcgcaggaaggcatccaatgcgccggggcgcggcagcgcgaccgaaggaatcatcgaattcatcgcggtttctcggcaagggtagggtggtcgtgtacgggattgcgtttcagccacagccgcaacgcatgccagtggatggcggccaccacctgggtggtcatcagtggatagcaggccaggacgcgggccagcccgcggccatccagggggtgtcgttgcatgacctgggtggcatcaaactggcgcgcgccgtcgcgccagacctgcatgtgcacgcgcaggtcctcatcagggcagttgaaccgccagtcgtaatgacaatccatcggcatgaagggcgagacatggaagcatttgtcgaaccgccagcgcagcgaggtgccttcctgcgtggccgttgcgaccggcagcacgtaggcgtgacgttccttccagggtgtgttggtgatctcggcgacgatgcagtccagcgtgctgccatcggcccggtagcagtagtagaagctgaccgggttgaacacgtgaccggcgaagcgcagatgggtgagcaggcggaccgggccggtgggccggtagcccagggttgatgcagcgtggtcgcgcactgcatcggccaagggccgcgcgggatcgccgaagtagtcgctgcgacggaactcggccagattgcggcgattgatcgaccacagccagcgcccggcgaacacgctgtcgagttcatccaggtcgagcagcagctgtgcgatcggatagcggaacgcatgcgggtgtggcaggtgcctgcggtgcgctacctgcccgaagtagagcgcactggcgctcatgcggccacctcgccgggagccgccatgacgtggtgcggttcacaggtgcgcagtgcatcgaccacgcggcgggcgctgcggatgccgtcctcatggaagccccagccccaataggcgcctgcgaaccaggtgtggcggcggccctgcagctcggcccagcgctgttgcgcgcgcactgcggcatggtcgtgcaccgggtgcgcataatgcagggtgcgcagcaccttgcccgggtcgattgcctcgctgcggttgagcgttaccaccaggggcgtgctgccgggcaggccctgcagctggttcatgcagtagctgaccgtgcagggcgcagcagggtcgcggggcacatgggcattccatgccgcccacgccttgcggttgcgcggcagcaatgacgcgtcggtgtgcagcaccgcttcgttggcctggtagcggatggcgccgagcacgtcgcgttcgatggggtcggcgtcacgcagcagcgccagggcctggtcgctgtggcaggccaggatgacctcatcgaagccttccacgccggccgcgctgtgcacgcgagcgccccacggcatgcgctcgaccgactgtaccgggcactccagccgctcatgcacccgccagcgggcgcgcagggcgtcgacatagcgggccgatccaccgctcaccacccgccacggtgcacgcccggtcatctgcagcatctggtggttggccatgaactgggccagatagcgcgccgggaagtccatcaccgtggccgtcggggacgaccacagcgcggaggccatcggcagcaggtgctcgtcgatgaaggcatcgccgtagcgctggctgcgcaggtactgccccaacgttgggccctcgtcttctgccagcaacaggggggcatcgcggtagaaccggcgcaggtcgaccagcatgccccagaaccgcggcgacaccaggttgcggcgctggcagaacaggccatccagcgaggtggcgttgtactccacgccgctgcgctcgctgtgcatcgagaagctcatcgtggtcggctgcgaggcgacgcccagctcgtcgaacagtgcggtcagcagcgggtagtgctggggattgaacacgatgaagccggtgtccaccgccatgcggacgccatccacctgcacgtcgtgggtgtgggtatggccgcccagatagtcgttggcctcgaacagcgtgacgtcgtgttcgccgtccagccaccaggcgctggccagtccggcaatgcccgaaccgatgatcgcgatgcgcatgtcagtacctcgccttggccagcacccactcgggaatcggcttgagccctttgaccagcccaagcgccgccatcgcgcgcagtccataccaggtcaggtccacttcccaccagcggaagccctggcggacggtgcccgggaagaagtggtggttgttgtgccagccttcgccgaaggtgagcagcgccagccagagattgttgcggctgtcatcgcgggtctcgaagcggcggcgaccgaagcgatgggccagcgaattgatggtgaccgtggcgtggaacagcacgatggtggagatgaagaagccccacaccagcaattgcgagccggaggtatgcaagcctggcgcccagcgctccaacccggcgcccagtgcatacagcgctgcggccagcagtaccggcacagccgtatcgaagcggtccagccagcgcagctccgggtagcgcgccaggtcgggcacccgcgacaggtcggtggcaaaggcctcgcgggtcaggaaccagcccatgtggctgcgccagaagccgccctcacggggggagtgcgggtccagcggctggtcggcgtgacggtggtggtggcgatggtgggcggcccaccacagcggcccgcgctgtacgctggaggcgcctatcaccgcgaacacgaactgcaccggccgcgatgcctggaaggtgcgatgcgagaagtagcggtggtagaacgccgtgatggcgaacatgcgcaccgcatagagtgctgcagccacgatcaccgctgtccacgagatgcccacccagatcactgcgatgcaggccaggtgcatcagcacgaagggcacggcgcgcacccagtcgatccgccccggccgctcgccggtggcctctgcggcgttgccggtatcgaaccagcgctgcagcgtgcgcagcaggcgccagcgtcgacgggggaggggcgctacagaggccatggcggatctcggcgggtttcgtgtcttcctctacgcggcagaaggcccactggatgcggagcgcggcaggaaatttggatttcacctggccgtaacggtgcagcgatctgtcagcggctgcgcccaggcctgctgccattcgctggcggggcgaccagccgctgcggcgatgaagcgcaccgtcacctgtggataggcaccgcgttgatcgcgcaggttgctggtgccacggaactccagcaggcgctggtcagcgctggcatataccagcgcaaggcgtggcgcgatgccgccgtaccaggtgtccaggctgacctcgatcgactgcgcatcgatcccctgccagcgctgcgggccgatgcgccttacctgtaccgggaagtagcgctgccgcgctggaaccaggaagggcagggtcacacgctcgccgcgcatgagcgcctgccaatgcaggcgcaccgccgcgtcgaaccctgcgtcgatgaccgcgccggtcggcaggtcgagctcgcgctgcaccggtgggctgccggcatcctccttccacgcgatcgagaccctgccgctggcggcctcgacgtcggccttctggccgctgcgccggtcctccagggtatagccgcgcgcctgtgggtccgcgctggccggcaggtgcttgcgggcgaaaggccgcccgtccgcgcattggtacagcacccagcgctcggcaccctcggccgcatcgcgtcgccagtgcacctcgcggtagagcaggtcgccgcgcgacgacgttgctaccccctcgattcgcagccagggcgcggccagcgcgacatggggcaggcacagcagcagccaggcggtacgcatcgcgttcatccgggaaaggagggctgaggtcatacggcggggatgggcggttggatgcgtccgcagcggctgcatccaatcacggcccctgcgcgtacagaggacagaccttcacccgcccgccgcgaacgccgatgtaccctgacgccgccagcaaccccctcaacttcgataccgcacgcatcgtgtccagttcccagcagccgagcagcgagccgacgaactgggccggtgacatggacggcgtggcacggcttcgtgaccgcgactgtttcatgcggatctatgattacttcatgccgcggctgtgcgtatacctgcggggcctgggcgtgcctgacgcggtggccgaggaactggcgcaggagagcctgctgcggctatggctgcgcgcggccgacttcgatcccgcgcagggtgcgctgagcacgtggctgtatcgcatcgcccgtaacctgcacattgaccgcatccgccgcgagcgcagctggatgcaggtgcaggcagccgtcgaggacgcagcaaccctggatgtgatcgaacgcagcagcgccgaacagtttgccgaccaggcccggctgcgccagcgcatcaacgaactgcccgccgtgcaggcgcgcttggtgcgcatgtcctatttcgaggccaagagccacagcgagatcgccgaggcgatcggcatgcccttgggcacggtcaagtcgcatctgcggcgcgcgttcctgcagctgcaggccaaagtgggaggtgcgctgtgaacccgcgccaccacctgcacgaatcgacgttgatgagctatgccgcaggcgcgctgcccgcgccactgagcgtggtcgctggtacgcatctggagcagtgcccgcactgccgccagcgcctgcgcgaggccgaggcgatcggctcggtgctgctcgagcagacccagccgcccgcgcctgatccacgccgcgaacagctgcgcgaggccatgctgatgcagctggctgcggaaatgccgattgccatggaccaggccgcgcgtcccgtgccgaaggagtggcccgaggccgacccggaccatctgcctgcctcgctgcacccctacttcggggcatcgctcagtgggttgcgttggcgctggatggcacccggcgtgcactgcatccgtgccgagcagatgccttcgctgatcatgctgaggatcgccccgggcaaatgcctgcccatgcacagccatggccgcagcgagctgacccagatcctgcgcggttcctacaacgatgcgctggggctgttcgcacccggcgacgtggcggacctggatgaagacgtggagcatcagccggtgaccgcgccgggggtgccgtgcatctgcgtgtcggcgctggatgcaccgctggtgttcagcgggtggctggcgcgcaagatccagcggttcgtgaaactctagtgcggccctggccatggctcaggcacggacattgcggattctcctgaccggcgctgcaggcctggtggggcagggcgttgccctggcctgccagcgttcgccgcaggttgccggcttgaccgcgctggtgcggcgcccgggcagcctgcgcggacccggcagcgaacgggtggtcccggacttcctgcacatcgacgcgcagcgtgatgaactggccgggtacgacgcatgcttctactgtgccggtgcgccaccggttggcactgccgaggccgagtaccggcgcgtgaccctggacaccacactggcagtggcccgcgcctgggctgcggtgaatccgcaggggtccttcctgtatgtctccggcgcaggcgcggacccgcaaagccggctgatgccgctgcgggtgaagggcgagaccgagcgggcgttgcaggcgctgccgctgcgcgcggtgatgctgcgtccgggcggggtccggccggtgccggggacaggtacccggcatgccctgttgaaacccctgtactggggcggcgcaccgttgatgaaactggccggtgcgctctcgccctcgctgatgaccagcaacctggcgctgggcatggccatgatcgccctggccggaagagaaaacccgccggccacgatcgagtgcgcggatatcaaccggatcgcggcaggcatgcgcgatgcgtccgcctgacctcagcgcgccgcagcctccagcgcggtgcgcactgccagcgcaaggtcactgcgggtaaatggctttggcagcagggcggctgcacgcccctgcgcgccaaccgcatcgtggtcgcgtggatagcctgacgtgaacaggaccgcgattgccggccagcgttcacgcacctcacgcaccagctcccagccggacatgcccggcatcaccacgtccgagaacagcaggtcgaccttggtgtccggccgttccagcagccgcaacgccgaggggccgtcgtgcgcttccagcacgcggtagcccagcaggcgcagcgcatcgactgtatgcgcacggacatcgtcgttgtcctcggccaccagcacggtttcctcgcgtggcgagtagccagccaggcccgtctgcggaacgcgagcctcgctaggcagcgccagcggcgagcgcgggaacatcatggtgatgctggtaccgccgccttccaccgaatcgatcagtacgtggccgccggactgcttgacgaagccgtgcaccatcgacaggccgagcccggtgccgcggccgacctgcttggtggtgaagaacggctcgaacacgcgcgccagggtggccgcgtccatgccgtggccgttgtcgcgcacccgcagcatcacgtactcgccgggggacgcatccgggaacaatgcggcatagtcgtggtcgaggtggctgttgtcgacttcgatcaccaggcggccgccgtgcggcatcgcgtcgcgcgcattgaccgccaggttcagcaccgaggcttccagttggctgatgtcgatctccacgcaccagatgtcctcggcggtgcggatgtccagttgcaccagttcgcccagtgcccgctgcagcatgtcctgcatgtccagcaggcactcgttgaggttggctgcctggctgcgcagcggctggcgccgggcaaaggcgagcaggcgctgggtgaggctggcggcacggccaacccccttcagggcattgtccagggcacggctggccatcgcgccggcttcgccggcccgttcgctgagcagcatggcgtgctcgatgttgcccgagatcaccgtcaggatgttgttgaaatcatgcgcgatgccgccggtgagctggccgaccgcctcgatcttctgcgactggcgaagcgcatgctcggcctgccgccgcgcagtagtttccaccgcctccgataccacggcagtggccacgccgtcggcgtccagcagcgggcgcagcgagacgtcgaagctgcgccggccggtgggcagttccagctcgagggaatgcagcgagttgcgaccctgcgccgccgcggcgacggcctggtcaaccaccgcgccgacgccgtcggtgttggcgaaccacagggattcgccgaagcgctggccgacaatgtccttcttgtccgccagcacggcggccaatgaagcgtcattggcatcgaccacgcgcccggacagatccagcagcacctgatgctggaagctggattcaaagattgcctgcagccgccgtttgctggcccgcagttcggcggtgcgcgcctgcacctgctgctccagggcctggttgtcctcacgcagggccagttcggcctgcttcaacaccgatacgtcgctgcccatgcagatgtagccggccacgctgccatcggcggcatgctccggcacgcagtccatctgcacgaatcgtgactggccgctgcgatgcacgagctcgacctggaagctggtgcgctcgccctgcagcacgcgttccaggctggggagggcacgttcgaaggcgctgatgccgctgacatcgcgggcaaggcgtcccagcaattcggcctggctcacgccatgccaatccaggaacgccttgttcgcgaagcggtagcggtggtccttgtcgagccgggcgatcagcgccggaacggcgtcggtcacctgctgcagctgcgcctggctctcattgagcgcagcctgcgcctgcaccagctggttgcgctcgtgggcttcctgccgcgcgcgacggatggcatccggcaagcgctgcaggcgctgcttcaccacatagtcgcgtgcgccgcgggtcaaggcctgcacggccagctcttcggtcagggtgccggagacgaagatgaaaggcgtgtgcgggatgcgctcgcgcgccagcgcaagggcggcatcgccatcgaatccgggcagtacgtggtcggccaggatgatgtcgaaggggcgattgtcgatcgcctcgatgaacgcattgcgggtccacagccgctcggcctcgaagtcgaggcctgcgcgctgcagctgtgcgctgatcagctccgcgtcaagcgcgctgtcctccagcatgaggatgcgcaggcgctcactgcggcgcgatccatcacgcatggtgctgccccgaaccgttgggccggtgcggcggtggctggttggtgatgccccagaacatgcccagcccctggatggcatcgaagaattccttgaaatcgaccggcttgaccacgaatgcattgacgcccagttcgtagctccgcaccaggtcctgctcctcgcgcgaggaggtcagcatcacgatcggggtgctgctcagctgcgcgtcgccacggacctgttcgagcacttccaggccattgaccttgggcagcttcaggtccagcagcaccacgaccgggccaccgtgcatggcgccggcgaacttgccttcgcagcgcaggtagtccagcgcctcggcgccatcgcgcacgtggatgacgtcgttcagcagctggcagcgtgacaacgcggccatcgtcagctcggcgtctttggggctgtcctcgaccaggaggatcggccgcaggtccctcatgggtgatctcctgtggaacggggtagggtgaaatggatcgtggcgcccttgccgggttcgccctcggcccaggtgcggccgccgtggcggccgatgatgcggcgcacattggccaggccgatgccggtgccttcgaattcctcgacgtgatgcaggcgctggaacacgccgaacagcttgtccacgtagcgcatgtcgaagccgcagccgttgtcgcgcacgaagaaatggtcttcgtcgtcgttgcgttcgtggccgacctcgataaccgcctgctcgcgctcgcgggtgaacttgatcgcgttgcccagcaggttctgccagaccaggcgcagcatggtcggatcggcctcgacttccggcagcggcgccagcgtccactgcacctcgcggccggcatagtccagggccaacgtcctgcgtacgtcctcggccagcgcagccatgtccagccgcaccctgcccaccgtcgagcggcccatctgcgagaagctgagcaggtcatccaccaacgtgccggccgatttcgccgattccacgatggtgtcgaggaagcggcgttcggtgtcgttgaggcgctcgcccgcagagctgcccagcagctccgagtagccgacgatgtggcggaagggagcgcgcaggtcgtggctgaccgaataggagaacgcttccagttccttgttgctgcgcaccagctgttcgttcagctccgccatttcctcggccttgcgcagcacgatgtcgacaatggcggtgcgcatttcgtgcgcggcatcgcagtcggcatcactccagggcaggctgcgctgctgcacggtctccttccacgcctcgaacgagttccgcggcgacagggccacgccgggtgcctcggtcttgcgcgggtcgcccccccagcgcacggtgcgcacgacctccggccggaaccacatcaggtagctgtgatggagctgcgagatcgacaccgccagcaggccactggccacgtcggtcaggtgcgcggcaggcgaccagtcgccggcgagatgatcggtgcagtacatttcctgcccggcgtgctggttggccagccagtcggccagggccagcacctcgctggggggcgggcactgccccacgcgcatgcagtcccccttgtgcacgatggccgcgccggccgcgccggtcagggacagcaggctggcctcatcgtggcgcagcgccgccatgaactcttcgtccccggccatgcgtgccagcagcttgaccagcaccgagcgacgggccacgcgttcctcgatcgcgcgcgcgcgctccttcagcgcgatctgcagcgacaggatctggcccatgaactcacaggccgtacgcacgtggtacggcaggcggcgcggctgcaccgcgtggcaggacaccaggccccacagccgcccttcgtgcaccagcgacaccgacattgatgccccggtgcccatgttgcgcatgtactgcaggtgcaccggcgagacgctgcgcagcacggccaggctcaggtcggtgggaggcgcgtcgcgatgcgcttccgcgcgcaacagcggcgcaggggtgtaatcgctgtccgcaatcaggcgcacccggttgcggcggtacagctcacgcgcctgggcggggatgtccgattcggggaagcgcaggtccagataggacggcagcaggccgttgccgtcctcggccaccaccgtgccattccagcctgcatcgaactggtagaccagggtgcggtcgaagccggtgaggcgtcgcacatgcgcggcggccagcctgcacaggtcttccaccgtcgtggcggtctcgatgccggacatcagctcgcggatcgccgggtacagctcttccagcgaaccgggctggcccggaaccggcgcctccagttcaaccagaaggtcggttgcagaccggtgcacgagcagctggtggcggccatggccatccagatgcaccgcgcccacgtgtgcgctgctgccgaccgtggcctgctgcaacaccgcctggaacggcgccagcacgccacccagcacctcggcgacgtgttgcatcaatggctcgccgaactgcagcagcagggcggggtggctgatggcgcgctcacgcacctgcagcgagtgcggttccaccaccagaagcacaccgtacggctggatcgcgccgggggtatggatcggttcgcgcgcgcaacgcgacagggcagcgtcgtgcgtgggctcagcagaaggcatcaagggcgggactcatgattcgtgaagggcaggaacgacccagcggtgtatccggtaaccatggatggtgaagcaaaagagcgtatccgcctacctccctgtgcatgtggcgtgtcctccctctgaaactgaattcttcatacaagcagcgatgcgcatgcggcaggcgtctctgccggcttcgcggccagtgcatctgcgctgcacgccggctcgacagcggctgccctagggtggctcgacttccgtcggataccacgcccgtgaacctgcagaccctgccttctacgccgtaccgcatgctggctgacagttgccagttcgaactgctggatgtggatgcactgcaggaccccgccagtggccggttgctgcacctgtattcgctggtggcccgttgcctgtcctgcgagacggtgttcaaggccgaagaaggacaaggcctggtcagccattcgtcggcgcgtgtggtgcgttgccccaccggctgcgggcagcaggcgttcaagccggcgctgctgaggaactggcgcccacaggtcgtggcccaggcgtaagcgatgcggcgcgctatcacagcagcccggggttggcacgccagactgcgaagttgagcgccgaggcgaagcaaatccaggccagatagggcagcagcagtacggctgccatcgtgcggacgcgcacgaacgcgagcatcgtcgcgcacaccagcgccaccagcaccaggatgtcgacgaaggcgagggcgcccagcttccagccgaagaacagccagctccacagtgcattgatggccagctgcaccagatagagccacagcgcaggccgcgcgccgcgccagccgcgctcccgccagaccagccacgccgcaatcgccatcatggcgtacagcagggtccatgccgggccaaacacacgggcaggcggcgcccatgcaggcaggacgagggtggcatagaagctggcggcggacgtcgaggcccacgcgcccagtgcggcggcggcgaaggtgatcgccacccatcccagaaggccataggcctgtgtgcgcttgttcattgcgtgcaactcgtcaattggggcgtcggtgtatacgcaccggggccggcaatggatgcagacggttgccttcagtgcgacgagcctgcagcacccgtgccctggcccgctggcagcaacgaaggctgctggtcaaaccactcgcgtgccttggccagatgccattggcgctggtcgccgtccagctcgatgcccgcacccagcagcccccaccgtagatagagatcaccgcgcttgcgctgttccagcagatccagccgcgcgcgtaccgacaggcggtcgttctcggcctgcaggccatcgatgaccagatggccagggcgccagcgcagcgtcgcctgcgcctgtacctgtccggaatccagcagggacaaggtccagcgcgggtagtcggtgcgctctgcgaacagcgccagcaacggtcgcgcatcgctgagatcgaggtccgtggtggcatccacctggaacggcgactgcgcatcgatgcgcccacgcctgaagtccacgcggcctttccatgccgtcgagccctgcgtgcccgccacctgcacgttgcgcagctcgaccgtggtgccggacagatcgaaatgacgctggttgaagtctccccggcgcagtgttgcgttcacgtcgatatcgccgcccatgtccagccctgccacctttgcactggcgttgcgccccaacagccgggccgtgccatggccgacgcgcccgtcggtatcgagggtcgcatcaccactcacggtgccggtgccacggagcagtcgcacctggggcgagaccaggtaacggttgtaggcggtcaggtcagggatggtggcttcactgaagcgcagctgcgcgcggacgcctttgcgcagttcctgcaggcggccatcgccggtcaggtccagggccagatcccggccgtcgaacaggcgcacgtgcttggcatcgcttggccgcgcggtgaagcggggcaaccggacggccagccgcgcctggctgggcgtgccggccttcagttcgccgtgggcgctggccgtgcccgccaagcgcacacccgccacctcggccacggcttcggctgcaggaatgtccacggtgctgccttcggtcagctcgccgttgcgaaggcgcaggtccgccttcagcgtgccgccgccatccagctgcagccacggcttgcgcacgaacagggcagggatccagttgagcgaggtgaacgtccattcgccgcgcactgtgccagagctgcgttccagcagcagtgcgggctgttggaagggaatgtcccggccactgatatgcagatcggcatccacctcgctgcctgaaccggacttttgcggcaagcgggcctgcaggcgcaggtccttggccacattgagttgcagcgccagcatgccgcgatcgggggcgccgtcgcccaggtagagcggcacctgccacagcgcttggtcgccgggctgcagttggccatcgatcaggtggagtgcggcctgcagccgtccgggcactggtgcgctggagatcttcggcgttgtggcattggtgtccatgcgcaggccctggctgcgggcatcgacctcgagctgggcatgcagcagcttcaacttggccaggccgggcgcctggtcccgataatggcgcggatagctgaagcgcgcggtgagatccatgtcgcccaacagctgcacgccgtcaaaactggtgtccgcatcgctgaatgcaacctcggattcgaacagttccgacggcccgccgcgcagctgcttgaggaagcccaccgtgccctggccctggccgatgatcagcagcttgccgaaacgtgcgctgcggatactgtcgctgtggatggcatcgaagcgcagggtccagccgcggtcgctgcgcggcggtggcgggatggcctcttccacgcggctgatctcggccgaaaccccggtggcctgcagccggggcacccgcacctcgcgctggaacaggggcagtaccgccagacgagcgctggcgcggtcggcgtgcagcacgtagaccgtgtggttcacatggccgcgcatgtgcacgttccaggcgatgacatggcctggcagcacggtaatggccggcccagtggtcatcacgaacttgtgcggcttgcggttggtgacctggtcgaacagcggtgtgttgaggaagatgttgccggccagcaggtacagcaggtagatgcccagcaggacgcaggcaggaacacgccaccgtcgaagccggtgcgggatgtgcgcggaaacagggggcatctactgctctgaaggccggaatatctggaactattgccgagccgatggcggtggcgcgtgaagcagctacggagcaggcgttggattctggtagtgtccggcctggtcaccaccacagatctgcaggagtcgcatggatatccggcccgcccgtgcaggcgatttcgacgtgatgtggggcatgttcgagcaagctattgcgacgcaggatgcgctgccctttgctggctctttcgctgtcgagacgtttcgcgcgcattggttccaggcccaggcacctcatgtagctgtgctggagggccgggttgtgggcatgtacaagatgggcccgaatttccctgaccttggggcgcatgtggccagcgccacgtatgtggtcgacgccgcgacacaggggcggggcgtgggccgagccctggtggaacacagcctggagcgggcgagggcggaagggttcctggccatgcagttcaattacgtggtcagcaccaacggcccggcggtggcgctgtaccggaagctggggtttgcggtggttggaacgctgccagaggccttccggcatggcaggcgcgggttggtcgatgtcttcgtaatgcacaggttcctgtagtgcctcggccgcatcaatcagcattcttcgggagtgtgatgacgaatgaggtgcggccatcacgccatcgtccatggacagtgccgcggtgcgcgtggcagatttcccgcaccaggaacaggccgagaccaaggctcgcgtgttctccctgtgacgcgttgtgcgagcctcggcgcaagggatcgaacaggctgttgaacgcttcgtccgacagttcggcccccgtgttgctcaccgtgatcaggatctggtcggcgaggccctcaaggctgatccgcacatcggtgccgtgttcgccgtactttgcggcgttggtcgtgaggttgtgaaccgcctcgcgcaacgaagaggcatcgaagcaaccgcgggcatcgccttcaacctcatacgtgatagggacgtggggcagggcagcgcgaagcaattcgacttcctcgccaagcgattgggcaagatcgcagtccaccggatgaatggccatcccatcgcccagcttgctgcggctgtaagccagcaggtcgtccagcagctttttcatgcgcatgctgccgttgatgatccgctcggcctgcttggccaaagctgggtcctgcagcccactggccagggtgtctgccgagaagatgatcgctgccaaggggcctcggagatcatgcccgagcgccgcgaggaagatctgccgccaggattcgacctcggcagagaactgagcaagggattcggccaccgcctggtcgatggcctcattgaaacgaaggatgtcatcgatcgatgaagtgaccagctgctggtcggatgcccatcgccgaagtaccgaagcccgaagcgctcgatactcagccaccatctggttgaggccaaagccggcgatggcgcgggttcggccatgataggacgcggcggactcggggccgggtttcaacggtgcaagcccgtgggactttgcgagctgttgggagtctgtctgcggcgatctgagatcgtctatgaccgcctgaagaatctggggaagatgattccgaagttgctttgcgctgaactcgacggtatcgggtgcctgcgtttcggcgaatgccaccgcgtcgtcgaggatttcccgcgcattctgttcgataaaatcagccaggcgcatcgccaaacccgtccttaagtggtgcgccgagcctacacgagggcgtttggatacggggtgagaaaggctcggcctgtggggcgcggttctgccggtgttggggcggccatatgaagggggagcctgcagcgcgggtcgggcccgggctgcggtcgcccgggccagtctggctagaacataatatacataccgccgttgtcggcatcgctaaccgcctgaatttgggcggtttttgcgtttgcgagacctggcatcgatagcgccaccagcgcgacgaccgcagccgccgcgcccattcggtccagcatcagacgccacaacgcacgctccgtcgcggtagtcgctcgctccgcgtgaatcatggcgatccaagtggggccatcgagcttcgccagcgcgcaaatctgcgcaattcgttcatctgagagcggcttctcgcctgcgcgggccttcgacagcagctgccgctgaattcccagtcgagccgccaaagcgttgtctgacgggattcccgtgcgttcgcgggcggcatcgagcagttcacctacggcggtcatggtgtcctcttggttgacaacgtgtggtccttttagattacatgctccgcgtggtccatatggaccacacccgccaccggcaccccaaggccgctggcgggttctcttggggcttggggtaggggaacagggatgatcgatccgctcattaccttcgtgctgctggcggccatcgtggtcgtgtccattggctgcgctcgcatcgtgtcgtggctgctcgaccggcgtgactacaccgccgcgcagcagtcccgcgaagcccaggtcatcgcactcgcaaaggctgagattgccgccaccaagcgcggcgacctgctggccgcagccgcctttgccgaagaacaggagcgcgctgcatgagccggtatccctcattcgccgaactggcggagctcgatatgggtctggcggcgtgcgccgctctgatcaccgtttggctgggagcgtcgttgctctccatcgtgatcgagcaggcatggctggcgcttcgtcgcctgtggaagctctggaagggccgctgcaatggccggtgatcgcgcggtgctgaccgggtcgggactccccgcgtctaacaggggagtcagtgaattcaggaacgagacgggcaccctgacggtcggcattgactggttttccgcttccatcgatctgcgcgcagcgctggacgaactcgcgttccgtgatggcgacagcttcgaagaggtccgccagtggatcgagttctccccggacaatgcacgtattgcggccctgcaggtgttctgctggtttttcgcggggctgggccttgaactggacgaggtggcgggcggcggtcgcttctacacgtggcgaatcaagatcatcgacgcggccaagaagttcgtcggcatgatcgaactcggcggcgaagagtgccgccgcgcagatggcacgtataccgctcgcatcgagctaaccggtgatgggtgcaaggcgataggcgcagcgcgctgcggccatgcgcagcggtggctggagcttcgagcgaagctcgaaagctgcgccggaaggatcacccgtgtggatgtgtgcgccgatgacctggtgggcgagtacccattgcgtctcgcgcagaagtggtatgcagctggtgagttcgacaaccgtggccagcgccccaaggcgcagctggtggacgactacgacagcggcgacggcaagacgctctacatcggcggcaagaagtcagaaaagcagttgcgcgtctacgagaagggcagggagcagggcgacaagagttcgccttgggtgcgctatgaggcgcagttccgcaactccaaccgcaaggaactgccgctcgacattctgcgtgatcccgcctcgtacctgctcggcgcctacccggtcctgtcctttctgcgctgcgttgccacgcgcatcgaaatcacgaaagccgccgttgaagcgacgtggaagagcgttcgtcgtcacatccgccgccagtacggtgcggccctcaatttcatcgccaagaactgccctgacgatcaggcgttgcgggcggtaatcgaatcctgcacttcgccatcgctgccgaagtgggtcacaggtgacacagcagcgcactggcccgaaatcgcggccgtacagccaacctcaaaggggtaacagcacatgagcatcaaggtcaccgtccttaagaacgaaattgacgaacgcggcggcagcttcaagaacgacgctggcgagaacgtcgagtacaccacccgcaagcagaaggccaagcttgaaaccggtggttttgcgtatccgttcgacgtgcgcctggacaagggccagccgggctaccccgaaggcgagtacgagctcgacgttgagtccatgttgcaggtcaacaagggcgtcgcatcgctgagcaagttcaccgtcctgcgcatggtgccgaaggttgcacctcgcgcgactgctcaggcctaagccatggccgtgtgcgtgtctctgaccgccgaggggacgctcgtacccaccggggagcctgcatcgcagtgtggcgggtatgtgcttgtgtcggcggcggaacacgctcaggcctcaattctcatcgatctattccagtggcccgaaccggaagtggccgctggttggttctcgggggtgttcacgctggtgctcgcactgaacgtgctgggctacatcgtgggcgccgtcgtgaagtcggtcagtacagaacgggattgaccaacccatatcccgcgcaaaccgcgcatcacagaaggagtagtgcaatggatttcgacagcatcttgaccggtctcgcagcaaccagtgccgttaccgccatcatcggtgcaggtgccatcaaggcctcgcccggctttgcccgctgggcgaccaacaaggtcgcgaccttcttccgctgatcgcggaagaatcgtgacggggaggggctgggaaaccggccccgattcctatgcagacgcagcccgatgacgtcaacaccgacgaataccaggacgactggtgtcccgagtgcggcggtgatgacgtgatcgcgttggacgacggcaacctatggtgcacggagtgccgcgctgtcatcgattactaggggctgatgatggatttcagtggggtttttctcgggctgtccgttgctcaggctgtcgccgcgatcgttgcagcggggacgctcatggcgcttccgtggtttggccgttggtgcgttgacaagatcgcgggcttctttgaggaccgggaggatcaggacgccgacgagcatgccgacgaagaggcgggcgaggttgaggaggccgtctgtggtgacaccggccatgactacgacggcggcgagtgcgtcttctgcggccaatcagagagggaggattgacgatgctggtttgcatggttttcgcgtttatcggcggcctcacaggccatgccgttgccttggcattcaatgaggcaagtcagtgattaggtattggattctcgtagttctctcgattgccttgtgcacggtcagcgcgcatgcggctgtcgtgagtgccgatgaaggggagtcctacctaaagtgcatgtctgagatgccgaaggccacatcaggcgggtacaacgtggcgaagtcttcgtgcgtacctatcaccatccaaggctataaaaaatgctaccggcagacctactgggtatttgaccgtgccggcgctactggcggcaatcagatcggcccgtatgagggcgccgagtattgctccaatgccacttgctcagctcgacaagaagaaaccagctggaagggcggcggcaatgcaggcctcgatagcgtgtgcagcaacggttgcgcctatagcggctcgctctatgcacagtcgccaacgggacgcctctttacgcccactggtgccacgtgcacggagaacgatcaccctgcgcccactacgcccgatccgggcgaaggcgggggtgatgggggtggaaccggcccaggtgacggcggcggtgatggcggtggcgacggtggaggtgacggcgggggcggtgatggtgggggcggtgatggcggcggtggcaacgggcccggtgatggtgatggtgatggtgatggcgacggggatggcgaatgcaaagacccggacggctgtgcgggacctgggccgggcccgggaacgggcgagggcggtgacggaggggcgccgggacctacgacagggcgcctctacaagaaatccggcaagacggttcagaaggtgctagcggagttcaagacggccattgagggcgccccgatcttgtcgaaggtcaaaggcttcttcggtagctgtaccggtggtggcagttgcccgaccgcaacatgggacggcgggcagtacgcgggcaagtttgacctggcgtcgctgtgctctggtccactgctacagctattccagtacgccggattcgtcttccttgcgggcatgggcatcgtggcgctgaggtgggcactgctatgaagcgtaatcatctgatcgtgctggctgctgcgctgcttgtgctcgcgttgtcagcttcgtgggcatatgccgatggggtcgggccggtcaccgccctcaccacgtgggcaaaggaacagatcacgtcgttgtgggcggacttctccgacttcatgacggatctacagaccgacttcatcgaattggtgttgtcgtttgtcaaggccatcgtgtacctgattccagcgcctgatttcctgtcgcagatcagcttctgcgcaatgctcaacgctgcagggccgtggacagcgttcatcgttgcccagttgcgcctcggtgaggctatcgcggtactgacggctgcacttgtattccgccttgtgcgggtgttcctcactctcttccagtggacgtaacgagatgatcttcggccatgaaggcttgccgcgcagcggcaagagctacgagacggttctgcatcacatccttcctgcattgcgggcgaagcggcatgtctacgtgcgcctaaacggggtaggggagagccttgacaagatcgccgcccacctgggcatgcctgaagaagaagtgcgcgagctggtgcacgtgatgggcgacaaggaagtggttgactggtgcgtctgcgacaccgacaacgatggcgccatttcgttcccacatatcgagaagcacgcactgatcgtgatcgatgaggcgcacgagtactggccgaccaaccgtgccaatctgcctgagcgcgctgcaaacttcttcgccaagcacggccatatcagcttggacattgtgatcatttcgcaggactgcaaagacctgcaccgcctgatcatccgccgcatggcgaagaagaacacgtataccaagctcgacgcgctggggtccgatcagcggtattcggtgcggttctatgcggccactggcaccggcaaatacgaaacggtgggcaccgaggtgcggaagtatgatccggcgatctgggagctttaccacggcgtgcagccgggcatcgagtccaacgaggtttacaagggcaacacgcgcacgctctggaagaccctgcgcggcccgtcaatcctgatggtgctggcgctcgtggttggcgtggtgatgttggggcgattcttcttcgctggtggcaccaccggagagagcggcaagctgaaagaagttgtcgcttcccagaaggccgcaattcccgcgatagcgcatgcgccgggtgctcagccggccacggtggtcacaaaggttgtcgagacgcccaagacgaaggagaagcttcctgcgggcgttcagtacattctggacatggcggccaatgccagggcgaggcacgccgggtggtacggccagcgcgacatcgtggagtttcgcgcgtcaggcggcgggcaagtgctcgatcgtttcaccactgagcagctgtgggcgctgggctggtctgtgaagcgaaccgagtttggcgtgctgctgagcgctaaggggcacgagatcattgccacgacttggcccgtagacccgtttggcgagcagtccgatgctacgaccgcgcgcataaaggctgcggcggggtcgcctgtgacgagcgcgagcgagacacagccgaccaccgccgcggcgaacgggagcaccctaattgcagttgggaagcgccccttgggcacgttcccagagacgccaccttatccggccagcttctgattaaggtgatgcatcacggacagggctggcccggtacattctcccagccaccaggtatgcggcggaacgtgattccgccgatgcaccttgtctcgctgcgccgctgctgtgcctcgcgttctgcctgttctcgtcgcgcgcgcacttcggccagcactacttttttctgatccgctatcggttcgggctgggggtcgcgatctacgctggttggcgcgattggtgcaggcgcggcctgaaagcgcgcatcccaagcgctgccggtcttcaggtgcagccagatcccagcaccggccatgcccagtagtagaacggcccacaaggccatccacggaaactcccagcgtgagcgtgggataggttgcaggtactccggtcgttcgcgttccatacggcccccaaggcgtcctgcgcgcattctagccggggtgtaggggcagcgcccctacggaagcgcctcacacgcgctggcggcgtttcggccccggtaccggcaggactgccgctggtggctcggcgtcggggccagccatcgccagcgatgaccgcttttctgtccgtcggcggacgacttcccggagatccacgatttcagaacccttgtaggccaagggtttccggcggcgttgcaccaggtcttttcgtggcgcagagtcttccatcagccgtcgccattcctgtgcctgtgcagcagtgagagacagccacgcgagatcctgcggctccagctcgcggccttcgggggtgaccagtcggccacccttaaacgaaaaaccggcccaagggccggttaggttgcgatcacgcacaatcaggctccatgccacagcagggccgagggtcgaggcaagatgcgtgccagccacccccggatcgccttgaacataatatacattatgcgaaatcatggatcggccgaatccgagccttcgtctcttccgcatggcaatggctgggcctctggctcggctcttgcctgcgacctcggccacccggagagtctcgtccacggcgaaatctagcgtcatctaccttgccgatgccctcagaatccgcagagaacggcagttgggcatgtgtgcgcgtccaatgtggtctacatgactcgtgggccgaggtcacgccagcgcgtgtaaggcgctctcgtgcggcgacgcccctacaccccaggagacgcggctgcagcccggtttggcgtaatctttccaaaatttcttttggggtgcccatggacaggcggaattttccatcgacggtaaacggatatctgaatcaatacgtccagttgatggatgtgaaggcaacggcggtggcagctgcggcgcttgtgcttatcgggttgggtctttccgatcaggcaaagagcgccgatccaatcctgcggatcgtgggggtttcattcgctggggtggcatcgttctacgcgctgcatacagtgcttcccagaacgcctcatagcggaaatgggcatatcttctggactgatgtctcgggctttaagagcgcagaggactactggaaatcagttgagaaattgacagacgaagacatcgggcgggagtacgcgcgccagaattttgaggtgagtcggattctcatcaggaagacgctccatgttcgacgagcgatagtctggttcggagccgcctgcgcttcaattgccctcgcagttgcagtgaactgacatgagccctcgcctttcatttgcggactacagcggctatgtctcagccctcgcaaatagcgtcccgacgacgattgagcgcctgagtgatatcaccagcgggcgtgtagcgccatccgtagaggatctctctatcggttcagcgcgcagtgtaacggctgccgtgatcttcttcgacatccgcggcttcactagaaggacgtcctcgtcgcaaattgatgagctaaagaagactcttttcatgctgaactgcgtgattccttccatgatgcgcgtccttttcaggcacggcgcttacgttgagaagaatactggtgatggcttgatggcggtgttgggcgctggtgaaaacgctgcctcgatcgcatctaaggcgctttccgcatgtagcgaaatgttgttcgtgctggaggatgttgtgaatccagtcctgaagcagcacgggatcgagcgagtggacgctcgagtcggtgtcgatctaggcgacattcttctcgcccgtattggggtgccgcgaggggctgctagtcacgatcgtagctcactcacagcagtggggcccgcggcaaatattgcatgcaagctgcagggcttggccggcaccaatgaaatattctgcggggaccgtcttcgcgcaggagaatcattgctgggtcaggcattctttgtcgatgttacacccccggactggacatgggtctatggcggcggcggacgctactcatgttggaggtatacccgtaaaacggtgagacctacttcaccgacaatattgggcggagggcttctaagaagttttgtgccgacggatgggccacggtaatttgagaatggccggatgcggcgggccttctgggaacgtgcagaagggcatttgccaacgtacgatcaggccgttcccatttgccgcggcggcagccggccgtgtctcgctcgcgctcgtcacagacgtcccgctgcagccctgatgcgctcggcggtcgaaacagactgctcatcaatcggccgccgaaagctcatctaggctattcatttactcagtactcgagtagattcatgaatgcacgctgggcagccaccttccgtacgaacgcgcctagcaccagggcgaagaaaatgtctgcgtggtggcgcacctcttcgttcaacctgatggtgtctactgcgtgcccttggtagtaatcgctacgctcgccgtcaacgctgaatgtgcagacgatatccgcctcgtccatctgtatcacgtgtcgtgatgacacttcctgcccccctgtggcgtgtgtaaaagtcacggacgtaacccaagagtcgttctctcgaagcgggctgcccgccatcatcgacggaacgagttgctgtgattcgctaagctctcgaatacgctgctcaaaggcaacagcggcccctcgcatggacatgaggacgatgtggcgctgtgccgtctcgtgctcactcatcatttcctgatatcgcgccaccgattccgccatgtcgacgggttgagcggtctggcgagggtgttgaatctcatcaatgcgctcgattagattgtcgattgattggaagcgcagatttggcgcaagctggaaaccgacatcaaagatgctggttagcctatccatcctggggtcatctttagttgtagtcggaaaagaattgcgcaggcgcttatggggtggttcgccgcccccgccgaacgacaacgttcgcgggtattcgtttgtcagaaggtagaaaagtattgcaaccacgaaggtaacgtccgatctggggtcattgcgcagctggccagcggtcatctccggcaggcgcacaaagcgattcccgagttcctgccctgctcgcgtatgccacccgtcctcgcgatcttcgagggggagccaggcgatgccgaagtcgaccagatgcagcttccctgctgtgtcaacaataatgttctctggcttgatgtcgcgatgcaggacgccattggcatgacatctttcaacaatgcgcgctagtgacattgcaatttccagcgattcgtcgatgggcatgggcgctgtcacgtactgctgcaggttattaccgtcaatccaggcctggacgaggtaaagctcttcgtcatctgcggcttggctaacgttagattcaaagatttgggggacgccgtccccttgaacttttattagtcccgcaacctcttgcttcattcgcctccggcgctcgtcacgatcttgtggatctgggagcatttctttcagtgcgccaagccgtccacagacgtttccgcgaacttgcgtaatggagccctgtccgccgccacgtttttttacgccctcgacggcggtccatctgtcattccaaaggagaggctgagcctgagttttcacgagatttccaattatttaaagggttcttgctgctgaaatgcaggtgcctttttttccatctagctagctgagagaggtgcggtgctgagtattctccaaggatcaactgaccaccctgcgttgatctcgagcatctgcggccattcaccacctcagatagaaattcctcatcacgattgggttgacttgacaggcatcacacgcttttgcgcgatctccagcttattgacgtcctccgcaggcacaagaagcacaactttccccgctggctcccacagcacgtaactatcacctaagcgacccgcaagtcccaggccgccttgtactttgccatcaattgtcacactcaccgtggacgggtttccgctggcagtgatctccttggcgcgccgcgatccaagccaactcgaagaaatcgacacgtagacaagcattacgagagcatagatcagccacggcgagtcctttacggcggttgggagcactggtgacaggcgcacagctattgcatatatgcccaccgaggctgcacctatcagaagggaccatccgttcgaccaccaaagcactgccaccagacccacaagacaaagcaccatcgccaaccacgccagcaggctggatttagacttgctcgccgtcacctttccttcgatccagccaccaagtagcaacgcaaccggcaggaacaacaacaccatgccaatgctcgcaaggcccgccagcgcaagctcgcttacggcgacaactgaaagggatccagtccgaaatggccccagtacgccttcagatagaaggcgccttgaatcaatccaaaggtgacgagcgccgaaccccatccagcaacatcggccatcgtcagtgtctttttcgtacgctccatgtatcccccttccatcaatgcagctcggccacatagtggcatgcagcgctccgccctgcagaatccactccattaacgtgacgcgtcacgcccgatcgccccaccccattggcgccccacccctcccccactatagtcccacccctcacaaggacgaggcggcatacatgccctatatcggaatcggactccacgtgctggcggccatctacttcgcggtgcacgccatccgctcgggccagagcctctactggctgatcctgctcttctcgttcccgctgctcggtagcgtcgtctacttcctggcgatctacttcccggaagcccgtaactcgcgcggcgcgcggcaggtggtccgctccgccaagcagctcatggacccgggccaggacctgcgcaacgctcgcgtcgagctggcgcgcacgcccaccgtgcagaaccgtgttcgcctgggcatgacgctgctcgatgccggccaggcggaggaagccagaaccctgcttgagcaggccgcaagctcgccactgggtgacgacccttacattctgacctgcctggcccgtgcccgcctcgagtccaggcacgccgcacttgcggtggagacgctggatggtctgtttgctcgacacccggacgtgcgccgtaagtcggaacagaccctgctctatgcgcaggcactggcagcctctcaggcgcccggtgcgcgcgccgcgttcgaccgcgccgtcgaatgcggaagcgatgcgactgcgcgctgcctctacgccgagtggctgatggcacaaccgcagcctgccgaccgtgagcaggcccgcagtctgttcgccagcatcatcgacgatgcccagcactggtcgcgccacgcgcgcagccacaatgccgcgtggttggagcggagcaaggttgcgctgaaaggctactgacgcctgacggcccttattagcaatcctgtcgcatccgcccacttacggcctcgccgaatggatgcagacaggcctcgggatcgcatcaagtcagtcgtggattgacctagcctacgggcctaagatcgcatacacaggaagggcaggctgcggtacattctcagtcactgagacctccggcgcgcatcctgcgccccatggacactgacctctgcatgcgcaccgactttccctccagccatcaaggattgagcgtggctattcgcactgtaacgagtgaaacccgaattaccggcgaaggcatcaagaaacacttcaggtcaactgatccaattcaggccatctatgaactggtttggaatgggctcgatgccggagcttcgaagatcgccgtgcgccagcttcgcaatgagctcggcggtgtcacagagatactagtgcaagacgacggcgaaggcatccgcttcgacactccggaggctaacttcggtcttttcaatgactcggcgaagaaactcgacgtggcacagcacggctcgcacggccgtggcaggctcgcctttcatcgcctatcccatcaggctgagtggcacacccgccatcaaggcagggatgcgcttatttcaattgacgaaagcgatatccgcaagttttctatcagagaaggcgatgtgggccaatacgtaacggggccgtccggcacgacggtggtgctcagtcgtttgcacagccagctgcctggtcgggaagaaatgctagcggcattcagccagacctttggctggtacttggcgctgcatactgctaagcacttgaatattgatggcgaggtcgtgcccatccccgctcatgagctgagcgggcatctgcttaagcttgagggtacccctttcaaggtggacgttattcgctggatcgacaggcctaacgatgaaaaatcatatgtatatctgatcgacagcgccggacgcacggttcaccgtcagttgagcagtttgaacaacaagaagaacttccatctcagtgtatatgtcgcctcaccctgggccgactcttatgcggattctgccgatttacttaatcccaaggcaaacacgaggggctcgcgaatttgggcggagctggaaaagaacgtatctgcaattacgcgggcgatctacgaacaattcctgcgtgacgaggcggaaaagaaggtggcgcagtttgaggaggatggtcactttccaagctatgcggggctggagcctcctgaggcagcgtggcgcctggaaaacaccaaggagctcgttaagaacatctacgttgcagatccgacattgttctcgctcaacaagaaacagatcaaggtgctcattcgcctccttgatcgcctggcaatctccgacgagaacgattctctgtgggagattttgaatggtgttcttgatctcgaccaacaagcttccagcgcacttgctgcgcagctgcagaggacaacgctggaaaatatcgtcaacacgattgaggtccttcagcggaggatcaacaccattcaggagctcagggtgctgatgcaagagcactacgccgaagttcgggaaactcctgatctgcaaaggatcattgaaaatcacacgtggctgttcggcccccaatacgagatcctcggcgccgaagaggcaacctttaccgagatcacgcgaaagcaccgcaacatggtgccaggcattcatagcgttgatcctgaagatctcgagggtgatgcttctttcgccggagcatcacgccagccggatctgttcttggctcgaaaagtgccgtgcttcgatagcttcggtaaagcgatgtaccgctgcgtagttattgaaatcaagcggccaagcgtctctttgaatatcaagcacatgcgtcagttggacgactatgctggaatcctaaggaagcacccggcctttagcagcgaccacatcaaatttgagctaattttggtcggacgcaagatatccgatgccgacaccgagattgctgaccgactgcgtgataaggcagcgagcggtgagccggggctctatcacaacgacggaaagtccaaacggtatatcctcaactggtacacattgctcgatggccacgagttggccaacaaggcgttgatcgatagcttgcgactacgtcgcaacgatcttacagatacctcacaggagtcgctggttagacagttgcaaggggctgagccgctgcgattcgatggcgcgaccgttgatgcgtgatggcgagcaacatagaggcccattaaatgccagcagaagttgcctagttcatcctcttcgctcgaggtgcggcaggtccgcaggcaggtgtcgggagcgactgttgctcgtcgtgatcagtacgaaagcgggtcgccaggcgcgacagcattggtctggcccatggcttccgctccataattggagcggcgcagtcgtgcgcgatgcgcggatttacctgcgacgcactttacctgagcctaaccggctaccttgggatgagtatcaagaaaaaccccgcccaggcggggttccatgtcaagctggtgcaccagacgagattcgaactcgtatctccgaagagacatctttccttggatccctctgatgaagaagccaaggcaaagatgcgtgtatgccaattccaccactggtgcggaatttgattataccaatgcagtagtcgggtagtcaaggcacggggcactgccaagacagtttgctggaagcggacaaaatcccggggaagggatactgacttatgacagcccttggcaattctgtcgcatccgcctcgctcatggtcccgccaggccgatgccgacagcccgtaggcccgcgccgccgacatcgccgacagccttgcagcgcaacgctccagcctcattgcgccgtatgcaacgattctgaaaatgttgaaagtggtgtcggcatcggccttactgcattggcatcacgcacgaccgcgcgtattccttttcgtgccaccaatacatcggtggccggggctcgaaatcccggtaacgcgactgtagtttgcgcttgccagccggcaccacgccttgtggtgccggctggcaatccgtcggccggctatggcgggcggtgcgtgggggccttgtgcccaccggtcttagtcgcgtaccggatttcgagccacgcaccgtccgccacctttatcggtggcggcttctgcatgcacgcaaggagcccagccatgacccagccccactcccctgccccgcacccgatccacgacgcgtccgccaacggtcctgccttggacccgaacacgctcatcgccctgctgcacagcatcggcgccggtgtcgcctccgatggtcagccgtggccggagcgtcaccagatgcccggccgacgcatcgccctggcggataccgattgctcgctggccgggctacgcgtggtgctggagatcctgctggccgcgcagcgtgcccgcgagaacggtgagctggagcagtacgtcggccctcgcgtcatggagggcctgatcatggctggcatcggccttaccgcacacgccagtacgcgcctgcatccggaggggtgagtggcgtggtgccgctgggcggccaacgcgctctgtcttgtggtggtggttgcggcacaggcgcagtggccggcgacgccggcgccctcgcctgtcgcgttccaaagcatcaacgacgatcgattctcacaactgcgccgccaggcgatgcagttcgtggactctcggccacgatagggcttccagttcatcgagcggcgccgagatgccgaattccaggttcattgccggggcatgcccgtgctgtggctggaggggcgctcgcaccatctgctgttgcaggtctcactggacgcggagcagcgggcgcccgccgttgtgcagcttggtacgttgcttcaatggcagctggagccggtgggctatctggagcaggtgctggctgacgtgccggaacctgttctgttggatcgggtgctgcagatgttcggggaggaggtgtctgagggggcgcgatgtggcccacactggtcacctgcgagccaggcattggcccagtgaccatgcgggtcacctcccggcatcgatccagcccgcatcgcgcgcacgcgcgagatcttctggcgtatcgatatccaggccgagttccggtgcctgcaggacatgcaccgtatcgacaggaagttgccgcaggcgcgctccgaagccgcggtcaccggatgcaccgacaggggtgaaccaggcgcgcggcacgactgcgggaacgccaagcgcatttccgtggcgggtgcccgcgcacgttgacgctgcggcgcgggcaccggaaagcagcgcctgcagatgggagcgctcgattgcgggctggtcgcatgccacgatcatcaccgcggtcaccgtgggcagcaggtgtgcgccggcaacctgcagactgctcgccaggccacgctcccagtggtgattggttaccggggtggcatccagcccggcaacgctggatgtcacggcctgtgcgttcgcgcccaccacgaccaggacttgcgctggcgcgagctccagcgctagccgcactacgcgatgtaccagggtctcgccctgccgggtgaggagctgcttgggctggccaagtcgggtgctcccgccggcagcaagcacgacgaccgcatgcgcgtcagtcacctgccgtgcgcgcttcgccattgctgcagctgtgcggcgatgctgagcgaaatcgcctccggccctcggccgccgatgttcaggccgaccggtgatcgaagtctcggggaaagccggtggcgctgatccggtgtcagcagcttgaacaggtcctcgcgccttcgccgcggacccagcagtccaatgaacgcgacgttggtatcagccagggccaccagcgcctcccggtccagttcaaaatcgtgatgcatcaccagtgccgcgtcgcaacggtcgccatgaagggcctcggccgggctggtctgaagatgcgcatccgcgcactgcccggctgaggcccagcgcgctcgccgttcggctacgctgacccgccaccccaggccgcgcagcagcggaaccaggaagggcgtttcgggaccgccccccaataccagggcccgcggaagccggggcaacggcaaacgccacgcgccctcgccaaagggctgtgtaccctccatcggatgcagctgccacgcctgctcgcgatggccggcacggaaaacgacctgccccgacgtgcgaaggtcgcgctggagtgacacgccctcgcgcaaccaagcctcgatgacgtcgtcgatgccggccatggcacgcaacggcagcagcgcaatccgaagccggccgcggcagccgagcgcggacccgctcaacaggtcgtcgtcactgcgggtgtcgatctcgatccagtcgacccgccctgccgcgctcacctgctccgcgcgtcgcgcgagctcgggctccaggcatccgccgctcagccagccgacctggctgccgttgcagaacagcaccatgtcgccggcaccggcgtaggtggagccatcggtttccagcaccagcgcgagcacggcgtgctcccccgcgcgcacgcgcgtcaaggccgtctctagtacgccgcgcgggctgccttcggcgaggaagcccggcgctgcggacaggtcctcggcaagatcgccgggctcccctccgcctgcggcggagacctccagagtgggcgaggctacgggtcggtccatgcgcaacgtcagcctatgtcgggcaagccgggcaacagcttgtccagggtgatgggatagctgcgcacgcgcacgccggttgcgttgtagatcgcattggcgatcgcggcgccaaccccgcagatgcccagttcacccacacccttggccttcatcggcgagatcaccggatccagcgtgtcgaggaagaccacctcctggtacgggatgtcggcgtgcacgggaacctcgtagccggccaggtcgtggttgatgaacaaaccaagccgtttgtcgaccaccagctcctccatcagggtcgcgcccgcacccatcaccatcccgccgatgacctggctgcgtgcggagagcggattgaggatccggccgccatcgcatacggcaagcatgcggcgaatgcgcgtttctccagtgtaggcatgcacggcgacctcgcagaaatgtcctgcataggtgccgacgtcgtagccttgtttgaagtcgccgaaggcaatgccgtcctccgccgacagggttcccgcctccgccagcgtgatggtccgcccatccgcctggatgcggccattggcgaagtttgcggtgtcgccgtcgaagccgagtttctcgcccaccttgcggcgcaggctgacgcacgccgcgtacacgcccgcggtggagcttgccgcgccccactggccgccggaaccggcggaggcgggatgacgggagtcaccgagggtgacctggacctggtccagcggcacgcccatggtctcggctgccgtctgcgcgatgatcgtgtaggagccggtgccgatgtcggtcatgtcggtctcgacaaccaccccgccctggccgtcaagccggacccgcgccgccgacttcatcgtcggtgcgccgcgatagcccgcggacacgcccatgccgaccagccaatgcccttccctgacctgcgccggcttggcattgcgcttgttccagttgaagcgctccgcgccttcgcgcaggcagcgcaccaggttgcggtcggagaacttcttggacggatcgccgggcacgacctcgggctcgttgaggatgcggaacgcgatcggatcgaggcccagcttctcggccatttcgtccatcgccacttccagcgccatgtggcccggtgcttcacccggtgcgcgcatcgcattgccttcgggcatgtcgagcgtggcgatgtagttggccaccaggcggttggcgcctgcatagagcttgggcgtctgcagggtgccgttttcgccatcctcgccgttgatgttgcccgaccagttctcatgggcgatggcggagatccggccatcctttccgcagccgatccgcacgcgctggagggtggcgtgccggtgcgtggtgttgttgggcatcaacgggcgttgcagcgcgatcttcaccggtcgcccgacctgcttggccgccaatgcggccagcaccgcgtcggcacggatgaacagcttgccgccgaagccgccgccgatatagggcgagtccacgcgcaccttggcagggtcgatgccgaggatcgccgccatgccctgcctggcccagtcgatcatctggttcgccgtccacagcgtgagcgtgtcaccctcccaggcggcgatggtggcgtgcggctccatcatcgaatgactttcgtcggaggtgtgataggtctcgtcgagcttgaccgcggcgctcgcgtaggcggtgtcgaaatcgcccagcgcctgccggtcgggcttgccgtcacgcccctttgccagcggcgcggacggtgccagggccgggaaatcgaagcggcccttgctgcgctcgtagcgggtgcggatcagcgccgcggcggcgcgggcctgctcgaaggtctctgccaccacgcaggcgatggcctggtggtagtgggccacttcgggtccgccgaacaacggcgcgttgttccagttcgatttgccgaccggcttggtttccggtgcggtgatgaccgccagtacgccgggcgcggcacgtgcgcgggaggcatccatcgaaatgatgcgccccttgccgacacccgcaccgacgatgtagccgtaggcctggttcggcgccacgtcatggcgctcgtaggcatagggggcggtgccggtggtcttgcgcggaccgtcgatgcgcggcgtcggtttgccgacgaccttggccttgtcgaacaggttgtcgccggcgggggcgttgaattgaaggggcatcagcgctctccttccaccagcacggccgcgagggtgcgctcggcgagcgcgatcttgaacgcgttctccggcgtcggacgggcgccggcgaacacctgccgggtcgcggcctttacgccatcgcgcagcagcggttcggctgcctcgacgcgccacggcttcggcgcaaccccaccgaaggcgaaccgcgccgaaccgtctcgctgcacgaccgcagcgaccgacaccagtgcgaacgcataggacgcgcggtcacgtaccttgtggtacacgtgccgaccgcccaggggcttcggcagcgtgacgtgggtgatcagctcaccgcgctgcagcacgttgtcctgctgcggcctgtcgccgggggaacgatggaaatcggcaatcgggatgctgcgcgtactgccgtcaccgctgacggtctggatcgaggcgtccagcacccgcagggccaccgccatgtcgcccggataggtcgcgatgcagctgtccgatgtgccgatcacgcccatctgccgggagaacccctcgagtgcgccgcaccctgatccgggcaggcgcttgttgcagggcagatggggatcgtagaaatacgggcagcgcgtgcgctgcagcaggttgccgccggtggtggctttgttgcgcagctgcccggaggcgccagccacgatcgcgcgggtcagcaccgcgtagtcgcggcgcacgcgctcatgcgaggccagcgcggtattggtgaccagcgtgccgatgcgcaggccgccctcgtcggtgggttcgatcctgtccaggccgatgtcctgcacatcgaccaggtgcgctggcgtctcgacctcaagcttcatcaggtcgagcaggttggtccctccggccaggaacttcgcgccctcggtaccggcgacggccttggcggcctcggccggggatttggcgcgttcgtaactgaaggccctcatgagcgcctccctgcagaggtcacgccagcaacctcttccatcgcctcggcaatgttggaataggccccgcagcggcagaggttgccgctcatgcgttcgcgcatctccatgttggtggcccggggccgtgcgctgacgtccgcctgtacatggctggggacaccccgcttgatctcgtccagtaccgccaccgccgagcagatctgccccggcgtgcagtacccgcactggtagccgtcatgcttgatgaaggcggcctgcatcggatgcaggtcatcgggggttccgagcccttcgatggtggtgatggcatcgccctggtgctgcaccgccaggctgaggcaggcattgatgcgctcaccgttgaccagcacggtacaggcaccgcattgaccgtggtcgcagcccttcttggtcccggtcagcttcaggtgttcgcgcagggcatcgagcagcgtagtccgcgtgtcgagctcaagctcccgccgcttgccgttgacggtcaacgccaccgtgctgatgaccggcggcctgggcggcgggggcgtcgccagttcggcggcgagcgatgacgcccccggtgcggcggacattgccacggtcgtgacgccgccggcgatcacctggcgacgcgtcaacttcattccttcatcacaacttggcacagtgacctcctggcgttcgggaaaatcccgtggctggatggacgcgctcacactacccaaggggcactatgcccatctgcggggtacaggcctgtgaagtcggcgacatgtacgatccgaccaatgcaggcaaccgcgacttttactcttcagcgcggcactcttgagccatgcgtatgcttcactggatggctcacagttctgtttatccctcacggcgctggcttcgagggttcgggctcgtggatagagccctccaacaatgccacgtaggtatccagcctggtgcgaaggccgatcagcatccagcccagcaggtacagcagcaccatggcgaagataagcagtgcgcctagcaatccaacatcgaaagcgcccgcccagtcgccccatttccatccgcggaactgcaggtagagggcaatcaacagcgggaatggtccaagccgctgcagcccgccatacatcatgcccatgcgctcaatcatgtttgtgcgcaggtgactgacgtacttgaggcgccgctcgcgctggacgcgcgggaatccgcgaagctcggtcaccaccgcttgccagtgcgcgaaatcgccatccatctcccgcgcgtgcgagagccgaggctggctgaactggcgaatgcccctgcgggcggccaggacgcccccggcaatgaaccctccaatttcgattgccaggcaggcaacaaccacctggagcactgcgccgacaggcagccatcgatccggaagctggccagtgagaatgccgacgatcgccgcacccatgccgacgcgaaacgcccacgtctccaccctgcccgccttcggatagatgctgtgctcaaccaaaccctgcacccgctgatagagccagtggaatgtcagttcctgcgaatcggtctttgccggaggatcgaatccgcctcctgcccgcatgtccattgcgcccccttgcccgccggcgcggatgccggcggtctcatcgtacccgagcgcgcttcggatggtgcctcagcgggaatcacatacccagctcagacaaccccgggtgatcatccgggcgacgccccagcggccaatggaacttgcggtcactttccttgatcggcaggtcgttgatgcacgagaagcggcgctgcatcaggccatcctctccgaattcccagttttcgttgccataggaacggaaccagttgccggagtcgtcgtgccattcgtacgcgtagcggaccgcaatgcggttttcggtaaaggcccagagctccttgatcaggcggtactcgagttccttgttccatttgcgtgccaggaactgccgggcttcctcccggccattggtgaattcggcacggttacgccactgggtgtcgagcgaataggcaagcgacaccttgtcggcatcgcgggaattccagccatcctcggcaagacgcaccttctgcatggccgattcaagggtgaacggaggaagtggcggacggggctgttctgcggacacggggagacctccaatcgaaatggatatacgggttgcttcaaaggatctggcgtacccaggcgctaacgcttggcctgttccaacaacagcttcgcgacatccttcgcggtgtctgcggcgccgtaatcacccatcacgcgcgacagggtgatggcgccttccatcaggatcagcagctgacgggccaggtccgccggctgcgccacatccagttgttcggtaagttcccgcgtgtaatcgagcagcttctgcttgtgattccgcgcgatttcccggatcggatcggcagggtcgccgacctcccctgcggtattgatgaaggcgcaaccgcgatagccctcggagtggaaccagttcttgagcacggtgaacatgccgaggatgcgtgcttccgggctgtccgccttctcgcactcatgctggaaccaggcgagccagcgcacgtcgcgcgccttcaatgcagcggcggccacgtcgtccttgttctcgaagtggcggtagatgctcttccgcgctacgcccgaggtcttcaccagcaagtccatgccggtggcgtggatcccgttctggtagatcagcgcctcggccgtggccaggatcttctgttgggtgtcggtggtgagcttgctcatggctgcaaggtagaacgagcgttctaccttgtcaacaggcgatcgcgatcgattcgtacgcgcacatccgtgcaagacgatctatcaagaaatcaggacagttcatcacccggacgcctgatcgcaggcgcaaagtacgtctcaccacccacccatgagagtttccgcatgaacaccttcgcccgtaccctggccgttgccgccctcgccctctcggtccaggccggcctgtccgcgcaggccgccgaaccagccaagccggctccggtcaccgccaacgcgcgcactgccagctacatcaccaccgccgacggcgtgcagctgtactacaaggactggggcccgaaggacggcccggtcgtgaccttcagccatggctggccgttgaattcggacagctgggagtcgcagatgatcttcctggccaaccatggctaccgcgtcatcgcgcatgaccgtcgcggccacgggcgctccagccagccgtgggacggcaacgacatggatcactacgccgatgacctggccacggtgatcaacacactggacctgcacgatgtgaccctggtgggcttctccaccggtggtggcgaagtggcgcgctacatcggccggcatggcaccggccgggtcaagaaggccgtgctgatcagctcggtgccgccgttcatgctgaagaccgccgacaaccccaacggcctgccgatcgaagtgttcgatggcatccgcaaggcacagatggataaccgcgcgcagctgtaccgggacattccgtcgggcccgttctatggcttcaaccgccccggtgcgaaggtgtcgcaggggctgatcgatgcgtggtgggcgcagggcatgcagggcggccacaagaacacctacgattcgatcgccgcgttctcggccaccgatttccgcgccgacctgaagaagttcgatgtccccaccctggtgatccacggtgacgacgaccagatcgtgccgatcgatatctctggccgccagtcagcgaaactgatcaagggcgccaggctgattgtctacccgggtgcgccgcatggcctgaccgacacccacaaggacaaggtcaatcaggatctgctgacgttcctgcaggaaaagtgagtggccagggctccggcgcggtgccggagcccttctgttgcctggcgcccaccttcatggacgcgccgcggtcggcatctggaatgtgaacacggtgccgtcgctctcactcgaccgcacgtccagtgtgccgccgtgggacttggcaatttccgatgcaatgtagatgcccaggccaagccctggcctgggcagctcgccctgctcacgcgaaaacgggctgaaaatcgttcccagccgctcaggcgcaatgcagccggcgttatgcacatccagcgtgaggcgatgggatgcggcctgaaccctcagcgtgactggggcggagcgctcgccgtgctgggctgcgttggtcagcaggttggccagcagctgcgacagcctgccggtgtcgcagaccacgccaccttcgatccgcatctggacgttgatgtcctgccgaccggtagcgatcgccacttcttctgcaacctgttcaagcgccgcctgcaaggtgtggctttcctggagcgagaccggaatgccccctcccagccgccccctggcgaaatcaagcacatcaccgatgaggccatccatccgggtgacgccggcggcgatgtgcgcgagcatccgctgctggcgctcggacgttgcctcacgttccagtgaatcggcggccacgctgatggcctgcagcgggctgcggaggtcatggcccagcaccgcgatgaactgatcgcgcagatcggaaacacgctgtgccgttgaaagggctgtctctgcctccagcagctgatcctctttgtcgaggtagttgccaacgaggtcggcaagcagctccatggatcgttggacatgcgcctcatcgaagttgcccggcgacgaatcaatggcacacagggtgccgaagaaactgccatccggccgatggatcggcacggaggcgtaactctccagcccatagatcctgggcgtatggtgtttggaatacagcggatgtgcactggcgtgcgcgaacaccacggaggtcgatgactgcctgatctcgtcacagagggtggtttcgaggaccagctgcccgcccggaacgagcccgaaccccagggtgtccagggtggcgcaggcggtccacgtggtttctgtcacccgggcaatcgcggtgaatcttgagcctgtgatatgggcgacggtttcaaggatgcgcggcactgcttcaatacggccgatctcagcgatgtcattcagcaggtggggatcggtcagtgtgtgcatgtagtggcagtcgggcgcagtggtgcatcatcccatgaatccagccacgaacactcagtccgccccgccccgtgcgttgcgccgcagcgattgcgggggctggccgaaggcgcgcaggaaggcacgtcgcatgcgttcggtatcaccgaagcccgtttcagtcgccacttcatccatcgtgtagcggctctgctcgatcaacacgcgagcggcctccacccgcaggccctccactgccttggcgggggattgcccggtttcctcgcggaacgcgcgactgaactggcgggtgctcagatgcgcggcctgcgccagttcttcaaccgacaaggtggcgcgcagattgcggcgtgcaaaggtcagcgcgttctggatgcgatcagaccgggcatccagctcgagcagcactgaatgctgggactgcccgcctccgcgccgatggtagatcaccagcttccgggccaccgccctgcacagatccgcaccgaagtcctgctcgatcatgccaagcgccaggtccagccccgcgctcatgccggcggaggtccagatcgggccatcggtgatgaagatgcggtcttcctccacctgcgcggcgggaaagcgctgcctgagcgcacgtgcgtggaaccagtgcgtagtggcgcggcgcccgtccagcaaccccgcttcgccgagaaggaacgcgccggtgcacaccgacgcggtcctgcgcgtgcgtgcggccgcgtgacggatcggatcgatcagcgcgccgctggacggggctggctccagcaggccggccacgatcatggtatccagcggctgctgcgcaagcggcgctgtctgcatggccatgccaagcgagctgggcaccagcccgccctgttcggacagcatgtgcagatcgtaaaggcgcgcgccttcggtggcattggccagttcgaaggcggacgccgcggcgatcgccatggtctggaatccggcgggcaggacaaatccaacactgggcatgacggtttttcaggggtggccgtaaacgaggtatatacgacatttacgacacgtacaagccgacctagatttcccctgaccccggcgacgttcgccggttcggactgacctctgtgaacgaccctacccatcacggcaccgcactcatcactggcgcatcgtccggcatcggggcgatctatgctaatcgcctggcccacgccggccatgacctgatcctggtcgcgcgacgcgccgaccgcctgcgccaactggccgaagcgctggcccgcagcaccggccgcacggtggacatcgtcgccgcggacctgaccacctccgacgggcgtgccgaagttgaaaaggtcattcaaggccgagcggatatccaggtgctggtcaacaatgccggtatcggcgctacggcgcccctgctgcagtcggatatcggcgagatggagcgcctgatcacgctcaacgtgaacgccgcgatgcgcctggcctacgccgcagcgccggtgtttgtggcacgtggccggggcacgatcatcaacatcgcctccatcgtcgcgctggcaccggagctgctcaacggggtctacgcgggaagcaaggcgttcgtgctggcgttctcgcagtcgctccaccatgagctggccgacaagggcgtgcgtgtccaggtcgtcctgccgggcgccaccgcaaccgacttctggcacctttccggcctgccggtggagcacctgccacagggcatcgtgatgagcgccgaagacatggtggacgcgtccctggccgggctggcgcagggtgaacttgtgaccattcccgcgcttccggacatcgctgagtgggacgccttcgagcaggcacgcaaggcaatggcaccgggcctttcgcgtgcgaagccggcgccgcgctatgtgagcggcgcctgatcggcgaacggcttgcagatgcccggcgtggtggagtgcgatagccggggatgacgtcgctacagcgccagttccctggcaaggaacggcgccgtcctgctgcccttggcgcgggccacctggcgtggcgtacccttcgccacgatggttccacctgcgccgcctgcgcccgggccgacgtcaatcacccagtcggcctgtgcgacagaacgcatgtcgtgctcgatcatcaccacggtgtttcccgcgtccaccagccgctgcaactgcaccagcagcctgtctgcgtccaacgcatgcaggccggtggtgggttcgtccagtacatagagcgtgcggccgcgttggctgcgctgcagctcggtcgccagcttgatgcgctgcgcctcgccccctgaaagctccgtggccggctgaccgagcctgagatagcccaggccgatctcctgcagcagctgcagcggccgcgcgatggcttcctcaccggcgaagaatgcctgtgcctggtcgaccgtcatctgcaggacttcggcaatgttgcggccgttccacaacaccttcagcgtggcctcgttgtagcgggcgccatggcaggcggggcatggcgcatagacactgggcatgaacagcagttccacgctgacgaaaccctcgccttcgcaggtctcgcaccggcccttggccacgttgaacgaaaagcggccggcgtcaaagcggcggcgtcgcgcgtcgggggtcgcggcgaacagcttgcgcacgtgatcgaacaggccggtataggtggccaggttggagcgtggcgtgcggccgatcggtttctggtccacctgcaccacgcgctggatggcgtccacggctccggcaagctggccccgcgtcgcttcgatcacggttggcccgtcctcgggcgtgctgtcggcgctgtcgtctacgggctcgtgccctaggtgcagcagcatcagctcgggcagtgcctgcgccatcaggctggacttgcccgatccggaaatgccggtcactgcggtcagcactcccagcggcagctgcgcgtccacgccctgcaggttgtggcggtggatgcccttcagctccagccagcggtcggcgctgcgttgccggctggcaggcgcaggcacctggtcgaacaggtaccgcgcggtgcgcgagtcctcgatgcggcgcaggccgtcgggctcgccactgtagagaacgcgcccgccgtgctcgcccgcttgcggtcccacgtccaccagccactgtgcacgtcgcatcaggtccagatcgtgttcaacgacgaacaccgagttgccgccatcgcgcagccggtccagcgcgtcgtacagcgcctggctgtcggccggatgcaggccggccgagggctcatcgagcacgtacagcacaccaaacagcaacgagctgagctgtgtggccagccgcaggcgctgcagttcgccggccgacagcgtgggcgtggcgcgatccagcgagagataccccaggcccagctcgcgcagctgccgtacccgcgccatgaccccacccgccagtcgctgcgcggccaggcgtttctcctccgacagggccgaggtcagccgcacatcgggcgcgccttcgtgggtcgcgtggccagaggctgcccgcttggcgcgatcgcggggcgtcgcactcctgccggtgcgtgcgccgtggctgtgtgcactgaagtcgccctgcgcgatgggctcgagcagcccggccagttgatccagcggcagccgcatgaactcgccgatgtccacgccggcgaaggtgaccgaaagcgcttcgggcttcagtcgcttgcccttgcaggcggggcacagcttgccttccatgtagcgcgagacacgcttgcgcatcagcgcgctctgggtgttggcgaaggtgtgcagcacgtagcggcgggcgccggtgtaggtgcccatgtaactgggctccagcttgcgcttgagtgcggcacgcgtctcggcaggcgtgaagccggcatagacgggcacggtcggcgtgtcctcggtgaacaggatccactcccggtccttcttcggcagcttcttccacggcacgtcgatgtcgtagcccagcgtgaccaggatgtcgcgcaggttctggccatgccaggccggcggccaggaggcgatggcgcgctcgcggatgctcagcgacgggtccggcaccatcagcgcttcggtcacttcgtagacgtggcccaacccatggcaggtgctgcaggccccctgcggcgtattgggcgagaagtcctcggcgtacagcatgggctggtgggccgggtacgcgcctgcacgcgaatacatcatgcgtaccaggctggacagcgtggtcacgctgcccaccgatgaacgtgcgttgctggcaccgcgctgctgctgcagggccaccgccggcggcaggccgtcgatggcatccacgtcgggcacgcccgcttggtcgatcaggcggcgcgcatacggtgcgacggattcgaagtagcgccgctgggcctcggcgaagaccgtgccgaacgccagcgaggatttgcccgaacccgataccccggagaacaccaccagcgcattgcgtggaatggagacgtcgacgttcttcaggttgtgctcgcgtgcgccgcggacctcgatgcagccgctggccgcggctgcgcatgacgactcgccaaagggggtgttggacatcttcgcgatcctgctgccaatcagtggaatacgtgcatgcgcacacgggcggttattgtcgctgttgcagggtgaatggagtgaggggatgtgtgattgcgtgcagcgtcggaacaccaggtgaccgacgccaaccgcgctacgcggctgattgttaacctgcattggctgaaggcttgacgccacgttgccgcacccttgatgcagccgctcacagtgcggctcctatgctgggcccgccactacggcagtgggacccaacctggagattcaccatgcaacgcgatcagaaagacctgccccacccggacccggaagcacagcgcaccgatccggtcagcccgcttcaggccaagctgcataaccatcgcaatcatgaagaggcgttgcaggagacgttcccggccagtgacccgatctcgcccttcgtcgcagccccgacgcccgacgagcaggccgcgcgcctgggtgagcgggtcaaactgccagaccgcgaaacggatgaggaggccggcggaggtgagcagtgatccggcgcggctttgcacgcgtcgcggcggccacggcgcggttgtccggcagtcttggggcattcgtcgcggcactgggggtgatcatcgcctgggccgccagcgggccggccttccacttcaatgacacctggcagctggtggtcaacacgggcaccaccatcgtgacgttcctgatggtattcctgatccagcatacccagaacgctgacaccgctgcgctgcacatcaagctggatgagctgatccgggtcagcaaggacgccaaccaggagctgctgaacctggaatcgatggagccggcccatcttgaagagatacgccagcgctacgaggcactggcgaagaccgctgcagacatcaagtccaagaaggagcgctgcatgccctgcgaagcggatgcaaccgccgaagcctgaggtcaccgctgcggcggcggcctacagcgccgccggtgtgaggccctgcctggcggggccctccagcagggccccggtggcggaaaagcggctgccgtggcacgggcagtcccatgtgcgttcatggccattccattggacgacgcacttgaggtgcgggcacagcgccgacattgcgtgcagctggccgtcatcatcgcggtagatcgcggtgcgctgtccgcccacgtccagcagcgcaccgcacccgcggcccagctcactgggagcgcgcgacggcgcggttccaaggcgatcgcccaccatatgtcgcgcaaccgtggcgttggtgcgggcccagcctgcagccgagcgcagcggagtaaagcgcatggggctgagcagctgctcgatctcgctggtcgttcccgtgattccctccgtgatcgcgcgcgcggccacgcccgcccaggtcaatccgtccggcccatagccggtagcgacccatacattgtcgtgcgcgctgctgccgatgtagggcagctgatccgcggcccggaactgctgcgcggaccagcacagcggctcgccctgcacgctgaagttgcgacgcgcgtcggcgaccagatgctgggccggatccatcgccggggtttcgccagtgcgatgtgtctcaccgaccagcaccagccagtcgcggccatcagcgccatgcaccccgcgcagcgagcggtgccggtcggcgatccagtgaatgcctgccgctggcggattggccaccggtaccgctacgccgtattcgcggtacacctccatctcggcctgcaccaggttgaatcctgctggcgagtgggtggccagcacaaagtgcctggcatggatgcgggcaccaggggccgtcgccactccggctgaagcctcgatgcgggtgatccgggtccagtcgtggatgcgcacgcggcccaccagatgacgggccagttccctgcagaacgccgccggatgcaactgcgtctggtcgggaacgcggaaagcgtgggccaaggtgaacggcagcccggattggcggtgctcgcaatgcaggccaacgcgttggtaggcctgcagctcgcgttcgaactgcgccgtggcctcgcgcgaacgctcctgcacgccgtactgcatggccacgcgctcgaagccacagtgcagatcgtagcggtgaaccagtgtttcgatggaacgcaccgcgtgttgccgccactgcacgacacgacgtgccgtgtcaccgccccaacgcgcgatcaggtctgccagccgggacacgggagcgtaaagattgccggttgacatcaccgtgttgcgtccgccgatggggccggcatccaccactaccacatccaggccgctgtcggccaagcgggcggcggtcaacaggcccgtcatgcctgcaccgaccacgagcacgtccgcgcgcgtggtcccggcgagcgggcggaagccgtgcggatcggaatcagctgaccataagctggcgcgcggggacgggtcggccatgaaaaggatccttgcaggttcatcggagagccttccctgatacgccctgccgggtgaaacgacggtggcgtgtccgtgcaggaaatgctcacgtgcgtggcactgccgcggtgaggatcaagacggggtgagtgccgcatggacacgatgccagcgtcgcctgcgcgaaccgcgaccctctgcttgcagcgtgattgctaacgtggctgcatggagggccaggcagtgagcacgcacctggaaatcgacctgatgatcgcgcaactggaggaaatgctgcccacctgggcggcgttctatcccgagccgcagttcatccgcatgctcgccgaggcgctggactacatcgctgccagtgctgacccggatgcccgcctgtactgcgtgatgcgcaccgggcacctcgattcgtgcagcggcgagatcccctgggcggcgcgctatgggggacgctaggccgatcaatcacgccgcgacggcatagggttccaccaacctggccaggacgtccatcgccgtctcggttggcgcatcgtcaccggtccgctgggcgaaccctgaccagtccgcgcgcgcaagactcttcaactgctcgggttgcgtcggcagccagcgcatcggccagaacgggagacgccggttgcctaccctgccgcgctgcagttcgatcagtcccgtgtggcttgtagcaccgagtacccgcgagtacgccacgctcaagccatcttcgggcccctccatgtactgcaggaaccgggcgccatcgaacagcagtacgccggtaacgccggcattccggttgaagcgcgcggcatcatcgaccaggtcgtccagcttcccgctgcgcaggcccaacgggtcacccgcaacggccgggcccgcctcacttatgtatgcgactgccctgatcggcattggctgctcctgtagcgaatccccccagattccgtatcgcaagcataggccaaccgcgccgacgatatgttccggccctgtgtattctgcgaatcagttgggttcgggctgacggacggtacgcagcacgggcctggcctacgggtctgcccgggcccatcgggcgagattctgcttcacttccgcgatgccggcccaagggtccttgcggcgacgtctgagctttgcgggtacgtccttgatcgtgaaggcgtcggcgcgcttgagtttcgccagatcaccccaggcgatcggcagtgccaccggcgcgcccggccgggcgcgcaacgaataggacgcgaccgccgttgcaccgcgcccattgcgcagatagtcgacgaagatccgcttgttgcgcaggctcttggtggcggttgccaggaaccgctgcggttcggactgtgccaatgcatcggcgaaacccttcgcaaaacgcttggtcaggtcccaatcgcaccctgggttgagcggcacgaccacgtgcaggcccttgccgccggagactcgcaggaacgattccagttccagctgcgccagcagtttccggatgtcggttgccgctttcttgacttcggcaaagggcacatccggtccgggatccagatcgaacaccacccggtcggcactgtcgggcgcctcggcgtggctgccccaagggtggaactccaacgcgttgaactgcaccagttccagcaggctggctgcgtcccgcaccaccaggtaatgggcgttgatgccgctttcctgcttcagccttaccgaatcgaccagcgccagcccggccgtatggtgtttctggaagaagcagggctttgcggtgccactggggcagcggatgatcgacagcggacgatccaccacctcgggcaggaggtgctccatcactgctgcgtagtaatcccacacgtcctgcttggtgtagccgtcgccgggaaacaggatcttgcctggggacgacagcacggggggcgcgcgatccgttgccggcgccctttccacccggcgcccacgccgcgcgggcgcttgcgaccgcgcagcggccggggccgctccggcgcgatcggaatcggcgaggtcggcgatatccttgtccgcccgcaccgccttcagcgacgcctggcgcaacagttgctgcccaccgattccgcggtagaagacctccaccacgaaacgcggttcgaaccaggtcgcggcgcgcagatcggtgtcctgcgtgggcacgtacgcggttggcttgcggccgccgccgcccttgatgcgcttgctgatgtcgccaatcagttcatccgagaacccggacccgacgcgccctgcgtagagccagccatgcgttgcgtctggccgggccagcagcagcgaaccaaagccggtgcggctgcctttgggtgcggtgtagcccaccaccgcgaactcgtcgctggccagctgcttcgtcttgcgccagtcctcgctgcggccgctgtggtagctgcgatcggcgcgcttggaaatgatgccctcgaagtgccgctcaccggccagacgataggcctggtcgccatccccctgtacatgcgaactgaatgccaatgggctgccctgcccctccagcaccgattgcagcagggtcttgcgctccagcaggggcgcatcggccacatccacgccatcaagatgcagcagatcgaacagcgcatacgtcaggacgccttgcttctcgccggaaagcgtggcctgcagcaggttgaagtcttccttggtgccggcgccggcgatcagctcgccgtccagtgccgccgacctcaggcccagggccgcgatcgcatcacgtatttcgggaagtttggcggtccattccagcgcgttccgtgaccacagctgcacgttgccctcagccaccgtagcaaggatgcggtacccgtcccatttgatctcatgcacccactgcccgccctggggcggcgcttcgcccagcttggccaactgcggctcaaacggcccggacggcgctgccgcccttttcgccttgctgagcgccagggccttcttcgcccagttctttctccgggcgcgtctggcaggtaccgccgtcagccgcttcttcgcggccttgccagcgccggcacgcttcagatcctccggtggcgcttcagcgacgtcccccagcagatcgtctgcctcgatatcgctggcaaattcgtcgtcgtccttgaacagcagccactgtggctggcgcgcgggccttcccgaccggaccagatgccagccgcctttcaacttggtaccgaacagctcgaagcgcagatggcccttggcgagctgggcttccggatcgccctgcgtggcccatacaccgtggtcaaactgggcgacatggccgccgccgtactggcccttgggaatctcaccctcgaacgccgcgtagtccaccgggtggtcttccacttccaccgccatgcgcttgaccttcgggtcgtaactggggcctttgggcaccgcccagctcttcagcgcatcgccaacctgcaggcggaagtcatagtgcctgcggctggcatgatgcagctgcaccacgaaaatggcgcgctggcctttcggcagcgccttgcccggctcgggctccttggtctggtcaaaacgacgcttgcggcgatactcgaccagggacatggccagctccgcgctatttgcccaggtgcttccggacagcaaccgccgtgggcccgactgccgcgacggccgcgcgaagttcgtcggcggacacgcccagcgtcgtggtccagtaccgcagttcgtaatcctcattgacgttgatgcggtcccggtccgggctgccggcgttgttcttgtcatcgctcatgggagtctccagcgtgatcgggggtgaactgaccgtaccggccattccatgggcactgagcgatgccactgtgaagccatggcgaaggccgccggcacggcgtcctgccgatgcgcgaaagacgctgcttcgtgaaggcagcgcgcagggtccgcgtgggaattcacatgccgccttcactccttccccgcctgatcgcaaccggacgggacctactctgggcactccattcacagcggagcccagcatggctatcaagacggcggaagatctgttcatccacgagctctcggacatctacagcgccgagaagcagctgaccaaggcgcttccgcgcctggcccgtgcggccgagaatccggatctggccgcagcgttcgaaacgcacctggaagaaacccaggggcagatcgaacgcatcgaccaggtggtcgaggtgctcggcatccgcctgaagcgcatcaagtgcgcggcgatggaaggcctggtcgaggaaggcaaggaggtgatcgacagcatcgacaaggggccggtgcgcgacgctgccctgatcggtggcgcgcagaaggtcgagcattatgaaattgcctcctacggcaccatcgccgcgctggccaagcagctgggctacaaggacgccctgccgttgctgctggagacgctggaggaagaaaaggcgaccgatgagaagctgaccctgctggccaagggcggcggcaatgccaaggccacgcaggccgcctgagtcgaatcgcatgccgctcggccgccatggaaggcggcctcagggtgggtagagcacctgatccttttggcagaagaacgtgcgtcgccgcgtcgtacccatgtacagcttgctgatggggccaccgcagagcgggcacacctttcgcgtatgcacctgccagtgcttcttcaattcgaagcgccgtttccattccaggaagtcgaagctgtaggcacgggcctggttgatcagggcggtgagcttgcgcggtggcaggtcgcccagtcgcgtggccggatgcacgcggatgcggaacagcacctcattcttgatgatattgccgacgcccgcgaagatcgtctggtccagaagcgcatcacagaccagggtgtccggcagtgccttcagcttgcgccgggccagttttggatcccaggcgtcgttcatcacgtccgcccgccagtcgtagacgtcgtccaacggctggtcgatcagtcggacggaacacgcgtagaaattcagttccccgttgtcgaatgccagcgacacccgtgcaggagctggcttccgttcgtcgatgcgccagctgccgaacatcatcagatggatgcgcagcgtgtggtggctgaactccagcaggaagtgcttgccccagctgcgaaccgccttgaccctgcgtccctgcagcggtgacaggtcgatgcgcctgttgccggagacgccgcgcacgacgtgacccttgaagcggctggaggcttcgcgcagcaggacaatggacgggccctcaggcatgcgcgttctcctgcagcagtgcctgcaggtgcagggcgttgccggtcgcgtggcccagcgcggtgttgtccagtacgcaccaggcgcggcgctgcgcagcggcttcacgctgcaggtgctgggccagccccgccagcgcctgttcgctgtaggggctgcgatagatctgcggctgcccgtgccagcgccagtagctccacgtgcggtcaccgcccgggacagctgctgccggtacccgggccgggtcagccgcgacccgtgcgatgccatggtcgctcagcagcgtatcgacgtccgcagtgaaccaactgggatggcgcggttcgcaggcgacatcaaccgaggtgcgtgcgcgcagtccgtgcaggaatgcctttacggttgccggctcatacgccaggctgggcggcagctggagcagcagcggccccagcctgtcccccagcgcgatcacgccatcaaggaacagcgccagcggctgcatcgcatcgcgcagccggcgttcatggctgatcacgcgcggcagtttcaccgcgaagcggaaacccgcgggcacgctcgccgcccaccgggcgtaggtcgccggctggtgggggcggtagaacgaggaattgatctcgaccatcggcaggcgggtggcatagcgctgcagtacgctgtcgcctgcgccgaacgccgcctgcgccgcgcgcgacagcgaccagcctgcgcagccgatccgtacatgtcctggcgtgcccggggcggcgcctgcgctcatcgtgctaccggtccgtccggctccagcaaccggccatcgccggcgcctggcggcgcctgcgccaccgattgcagtcgatcaagcgcactggtgccaggagcgagcgcggaggcgctgcgcacgaagccggtccagtcggagatcgcgatctttcccagcgccagctcatccacgcgcacgctgtgcatgcgccagtgcgggaactgccgccgccccaccctgccccggttgagttcgaccagaccgttgtggctgccggccgccaggatgcgggtgtacgccgcgctgacaccggactccgggccttcgagatattgcaggaagcgcgtgccgtcgaacaggaggacgccggtcacatcaaccgactcgttgaacagcatcgcgtccgcgacaagctgctgcagccgttctgcagtcaggtttcgggtggcttcacttacatatgcaatggcacgaagaggcatgacagcaccgggttgttgcagatggctctaccttagcggtgcggatcaaacgcgcggtgacaccggcgtggaggcggcgttgaacctgtacgtgccaacgccgcgctgcgttgacacccggctcgagcaacacgaccggcatgccgtgtcttccgccgatggatttgctttcgtggagaatgcatgaggaagcgcgtgcctgcgcatgacatcacgttggcggtggtgccaccgccgtctagcggcggatctggaagatggtcgctgccgccaatcgggcggctcactccaaggagactttccatggccaaccagaaccagaaccagggcagcagcaaccgcggcttcgcttcgatggacgaagacaagcagcgcgagatcgccgccaagggcggccgcgccgcgcatgagtcgggcaacgcccatgaattcagctctgaagaagcgcgcgaagccggtcgcaagggcggcgaagcggtgagccaggatcgccagcacatggccgacatcggccgcgaaggcggccagaacagccatggcggcggcaaccagggtggcaaccagggcgctcggcagcaacagcaggaacgtggcggcaacaacaaccgcggtggccagcagcgttgatcgagactgaccggttgcaccccatgtgggcggacagcgtgtccgcccactttttttcacgcgaaacgtggggcggaggcccgccccggcctgtcccgcgtcaaggctcccgtggcggcaggtcgagcgcaccggcgcccggcccggcgcccagttcggcaccggttgtcggccgtgcttcgggatcggaaagcgttcgcagggtcatggcctgcaccgccgcctgctcgcgtgggtccaggcccaccgtggcgctgccgtcaccgccgtccacagcggcctgagcctcgcggtcgctgacccgctcccacagctcgccgctgttccagctgcccagcaggtcatcggcgccgtcgccctgcgacatgtccatgtacaggtcggtaaaggcggggtcacccggctgcttgcccggtgggaagttgggctggatgctgtgcaatgccttttcgaaggacttctggtgggcgatttcgcgcgtcatcaggaagcgcagtgcgtccttgatgcctggatcatcggtcgccgtgatcagtcgttcgtagaccagcttggcgcgggcttcggcggcgatgttcgagcgcaggtcggcggtgggctccccgatcgaatcgacgtaggccgccgtccacggcaccccgctggaattgaccagcgccgggccgcccccatacaggatctgttcggtatggctggtgctgttctggcccagcagccgcatgtcctcggcttcggcaagaccctcggactggatggccttcgggccgcggttgagcatggcgatgatggtgccgatgatctccaggtggctgatctcttcggtggcaatgtccatcagcaggtccttgcggcccggatcgcattcaccgagtccctgggtgaagtaacgcattgcagccgccagttcgccttgggggccgccaaactgttccagcatgaggctggcaagctgcgggttggattcgcgcacgcgcacggtgtacatcagcttcctgtggtggaagaacatgggactgtctcctgtgtatggcaggcgggaccgggatcaacgcttggcttgggcgccaggcgtttcgtcacggttgaggaaggcgccgaccaggctgtcctggtgctcttccagccagcgcgccatggcgatctcttcctgcaggatctggccgcacacggccgcgatatccggcgcagcggcccgctcggccgcgatcaccagcgcccggtaggtggcgatctcggtgttctcgaagccaaaggagatgccgatgctcttgacgacctcgtcctccatcagggtgttgccggcagcgtggatcgctgcggtcatgctcgcgaacagccccttggcggtgggcacgcttccgccgagcgcttcaatgcactcgcgcagggaggcggcccgctgctgcgtctccagtacgtgctggccgatgcgtgcggcaagatggggatagttctggatgcgcgaagccatggccttcatcatggtctccgcctcctgctccatggcgtaggcatcctgcagccatttcagcaggcgctcgctgcggacggtgttctggtctgccatcatggtctccggtagtggggcgacatgcctccggagaccatggtggcgaggcagcaatcactgccccgtcggccggcgtgagccggcgggcgtgcgcgctgcacctggcgctgatgcggtcataacatccgctgttgcgtggcaacgcctgccgcgaactcaggcgggcatcgcgccggacactacagcgctgccggcgtcgcgacgggggcttgctgcgggtgcgcgcgcgcctgcggacgccttcaacgcctggatcacccggtgctgcgcacggtgcgcgcccccttccacgcccacgacgtagacaaagcggccatcgaacttggcctgggcaccctccagcacgtcatcctcctgcagggcgcgcttgagcgacttcatccatgcccgttcgggggtgcgatccagctccacgacgatcgcagcgccgccgcaatccagggacatgcactccacgcgcaatgcgcagggggcggtggggtcggtggcggatcgaggcatggtcatggctccagtgctgggggacggcggcagtatccatggccgccgccaacgcgccgtcaaaaaaggcgcaccgccttccacgccgcatcgacggcatggagcacctgcgcggggcggcttcgcgctgggctgacacggcccacgcgcgccgttgatgcaatacagcacacactgcagttcccaaggcaacacaggcatgcgcgcatgcaatcggaaatggaccagcgcaggtgcaacctgctgctggttgaagaccagctcgacctggctgcactgatggaacaggcgctggaagacggcggcggccgggtgacccacgcctacagcgtgttcgatgcgctggggctgctggatacgcaacgtttcgatggcgcggttctggatgtggagctccgcgatggcgtggtgttcccggtggccgatcgactggcggaactcggcattccctacctgttcgtctctgcggtctatgaccagctggtgccgctgcgccaccgccgcgcaaccttcgtggccaagccgttccacatcgaccagttgcaggaagccgtccagcaggtcgtgggagacgcctgcgcgccccctgccacgcattgagcggcagacgccgggattacgccaggtgtggggctaccacctgccccagctggcgcagcgcaccaccgcgggagagcccgctccagttgccacgagcgacgctgcggatgtcggcagggtcggtccagagcagccgcatcgaccaatagggaaagaaccggccggataccctgccccggcccagctcaagcagttcgcaatggctgcgggcaccgaggatacggctgtacaccacgttgatgctgtcttccggtccctcgatgtactggaggaagcggtgcccatcgtaaagaagcacacccgtcacgcctgcttcgaagttgaagcgggcagcggccctggcgaggtcgtccacagggtccatggaaagccccggtatcgcctcacttgcgtaagcgattgcgcggaggggcacgttgattccttctgacgcaggaagtgtcctgcccttccatgatgctgcccttgccgtagagccaaatgaggcggttcacaacctgcctcgctccatcctctcccctgcggcacactgcagtaacaggtttccggctcaggcggcctttgcgtagggctcgacaatcagcagcagcttgtccatcgccgtggcatcggcctgtccggtcgctgcccgctggatgaagctgttccagtcggcacaggcgatctcgcgcagctcatctgcagtgacggacaggcaacgcatgggccagaacggcagccgccgctggccgacacgcccccgcgcaagttcgatcaggtggatgtgactgctggcgccggtgacacgggagaaggccacatccagtccatcggcagggccctccatgtactgcaggaagcgttcgccgtcgaacagcagcaccccggtcacccctgcgccccgattgaagcgcgcggcatcgtccatcagcgctttcagacgttccggcgagaatccactgacggcctcgctgacgtaggcgatggctcgattcggcatggtgccactcctgctcttctagcgcttcactctaggacgggcatcgtggcgaaaccgtaaacgccagccgggaaaacatcacatcatgcccaattcagcgtggcttccgaggcgcttccaggtaccgccatccgccgatctgccgccgtggcggggcgcgcaccctccattccggccaggtaggccgagaaccctccggtcgcgcgtcccaccaggcgggcactggtcatgacgatgggagcgccggcccaccttacgtcagcgccgaggcattgcagcctcctcaccagtgcaacatcctctccacagcgcaggggagcaaatccccctgccgccagataggcctgggcggagacgccgaaattggcaccgtggatgcgcccatgatcgtcgccccactgctgccgtttctggaacgcgcgtcgcaggcgcttctccgtcctggaggtggttgctatgtccaccagtccgcagaaggcgtcgcaccggccctcaagctgggcaaccagccattcgggaggtacctcgctgtcggcatcggtgctcgccagccatctcgcaccgcgtccgagcagctcagcggcggccgctgccctggcaacgccgacgcagcgtgcttccaggcgcaccgtatcgacccgctgctgctggcagatggacgcggtggcatccgagcagctgtccagtgcaaccaccacctgcactgcttcgccgtgcagcccgggatgcagggctgcccttcggatcgattgcaggcagcgctccacgctggctgcctcgtcatgggccggaaccaggatgccgatcatcgcaggtcctcgttgcgggccagcgatagtgcgctgcgcgtccagccctgcagcacgaagtccgcatcacgatagtggaaggcttcgtgcaggccttggccaaggcaccgatgcacgacgtcggtgcgacttgcgcgcccatggaacgaaggcaaccaatggcaggcgaccagcagtccgtcgtcgcgaagggccgaatcgatgccggcgcgcagctcgtgcagcgctgctgcacccaggtagtagcccatttccccgcagacgatcaggtcgaagcggcccggcggccattgctcgggatggctggcgcaatggacctgcacatgcggcaggtgggccaggttgcggcgggcccggaacgctgcgcgtgggctgatgtcggtggccagcaggcgctcgcagcgggcggccaaggcctcggtcagcacgccgttggagcatcccagctcccagccccgagtgaactggcgctggctcaggctggccagcagcagcgcacgcttgcgttcttcataccaccggctgcgatagccgaagggatcctcctgctcatgcagttcatcgaagtatggttgcgcgctcatgccaggaatacctcgtagttccggaagaatcgggtcagtacatgtgcgggcagcaccggcgggctgttcaattccggcacctcgccggtctgggtccggaagtgcgcgatggcgtttcgttttgcggcagccactgctgaaatgtcgatcagcctgggaacctcccacgccatgtgtgcgcaggcggggtcaagccagtgccagccccacaccgggtactccaggcgtcggcagcccactgcccgcaccgccctgcaggcagcacgccctgcggcttcatgatcgggatgcccatcaaagcgccagggtgccaggaccaggtcgctcggctggaggtgctgctgcagccaatcttccaggccctgttcgtgcgcactgaccgcgccgtcggcgatgccgagatgaaacgcggatccaggccggataccgagttcgccaagcgctgcggcaagctcggcgcgtcgcgccgagcgcaggcgttctggcgtccaccagtgctcgtccggatagcacgcttcgccatcggtcacggcgacgacgcgtacctccatgccctgctccgcagcgtgacggagcagtccaccacagccgaggatctcgtcgtctggatggggtgcgaccaccacgacgcgatcatggccggcgcacagggcattggccgatgttgccggccgctgccacagccaatcgcagcgcagccatgcctgctcctgcgttccttccccctgcaggggtgtcctggctacagcgcccatgtcgcctcctggctcgcccgctggccgcccagccattcccaatcgcgatctgcgtggttctgccgaaggaacacggtcaggtccgcgcagcgacgggcgtgggcatcctccaggcacatcggcgccgggcccagtgcgcgccccgccagatccaggacacgcgtcgccgcgcgctcgaccacgcagcgcaggcgcacgacctcttcgcgatgcgccgattccggcgcggcgtcgatgcgtgccgccacttcgcgaagcagcgccgccgccgggcccaaggcgaggtccacttcacccagtaatcgcgcgcgattcccctcggtgcaggctagccgcatgcgctcggccaaggcgaccgccgcgccgaaccagactgccgcgatgcccgcaccgccgtgccagaaacccggtcgctgcaggtactcatcgcgcgttcccagaagcgccatcggtgcgccgtcgaatcgcaccgtggtggacggaacgccggccatgccaacggccggccagggctcatctgcaagcgtgcgccagtgtttcgccgcgacctggcacagccacacgccctgcgcgttgcggacggttaccaatgccgcatccacccacccgctgccggaacaccagggcttgtcaccatggagctggccgtgggcatcgaagcggagtgtgttggctggaccttccgcggcccagaccgccagtagctggccttcagccagggcgggcgcgttcagttcggcgatgatcgcctgggcgtcgtagtgcgcctcaagcactttggccaggcacaggtcttccgccccccatgccgccagcgcctgccagcgctgcagcgtgcggccgcttccgggcaacggcaggtcgggccgctggaccactacctcgcgagcgcggccctccagcggggatggcgacgtcacatgctgcatgaaggggcctgaaatgaagagacatgtcgaacgtaggcggcaagcggtcacatcgctgtctgggaggcgtagccggcgcatgaattctctgcgcgatgatcctcacgcgctcgcttgcccgcgctgccgtcgtgcgcgcaggcactgcagcagctcccacaaccatggcagcacgaccacgcccagcgccggcagcaggaccagccaccagacgcccggtgctgcaggcttcacttcgagcgaccaccgggggtggacctgccagcccacccagcccagcaggacccacggcgcggcatcgagcacgctgtgcacatgctgctctgccgggctgatgcgtcgtctgccgtccgcgctgacggtgtcgaagtagccggcgattgcgtgcgcgaggaccagaagtgccagaaacgtgacgagcgacagcgtgttttccagcaggagccatgcgagcaccccgcttccgatcagcagcaactgcaccccatgcaacaggctttcgcgcatcgcagaggtgtgtggaaggtcggtccgccggtgaaaatggaagtccagccagccggcagccagccacagtgcgtagacaccggcggcaatcgcgctcatggcagcatgctcagggtgtcagcacgatcttgcggcagtcgtcatccttggcatcgaatatcgcgtagccctgcgcagcgtcggccaggcgcatccggtgcgagatgatgtcacccggatccagctttccttccatgattgcgtcgagcagttccggcatcagtccctgcacatgggtctggcccatcttgaatgccagtcctttgtcgaacgcatcacccagcagaaaaccatgaatgaagccggcatagacgcctggaatgctgaccacgccgccacggcgcgttgccgcgatgcattgccgtatcgccacgccactgctgccttccagctttacagcggtcaacgctgactccagcgcactgccctcggcctcgaagcctacggcctcgatgcaggcgtctacgccccgcccactggtctgggtaaggatgtaatcggccgggtcttctatctccttgaagtcgatgggggtcacgccgtaagcacggcgtgcatagtccaggcggtaacgaaggtggtcgaccatgaagatggtctctgctcccagcagccggcaacaggccgcgctcatcaacccaaccggaccggcgccgaagatggccaccgtcgagccgggcttcacacccgcgttcagcgcggcctgatagccggtcgggagaatgtcagacaggaacagcacctgctcatcggccacgccttccggaatgcgcaacgggcccacgttggccttcggcacgcgtacgaattcggcttggccaccggctacgccgccatacagatggctgtatccgaacaaagcagctggaggcagcagccctttctggttcagcgccgcgcccttgccaggattggtggtctcgcatgcggcatattcggccagcctgcagtggaaacactcaccacaggcgatcacgaagggaatcaccacgcgatcgcccggcttcacctgggtcacgccgctgccgacctcttccaccacgcccatgaattcgtggcccagtacatcgccatcgtgcagatcaggaatcttgccgcggtagaggtgcaggtctgaaccgcagatggcggtggcggtcacccgcagtatcagatcgtcatccgccgccagtaccgggtcgggcacagtctcgacgcgcacatccctgcggccgtgataggtcaatgcctgcatcgtgctgctccaggagctcgggccttcagcatcgcaaggccgccatccggctgcagtgacatcccggtgtgcgcggcgttcattctgcagcgtcgtggcgttaacccggcgcggcgcaggcttcactctctcgccgcaggagctgcccatgaacgacaaactgcccttcaatccaacgacggatgtggacgatcagtcaaaggcgcacacgccggacaaacggcgcaatgatcgagccagatggaaggagcacgacatgcccgacgacggcgatggccccaaggcggtaccggaggactacgagcgccctgatcccgatccgacggggaagcgttgagtccgcctcacattccggatgcgcagcaatcacgaggcatggctctttgtcggcgcaagcttcatggacggtctttggagcagcctcaacgaggtcttgcatgtggaaacgcaacggtctctcgctggtgctgcttgcgctcacgttggtgttcattgtggggcaggcagttgcggggcatcacgtgcacaaccaggaactggtcgagcacggacgcatgccgatcgatttctcgcactacctggctaccgggcacttcgtcagcgctacgttcgagaactgggagagcgaattcctgcagatggggatgtacgttctgctgacggtcagcctgcgccagcgcggttcggccgaatcgcggccgctggaccccgcgcaggaacagaatcgcatcgaacccggccgcacgccctggccggtcaggcgtggtggcctgtggaaggttctttacggtcattcgctggcgattgcgttcgggctgttgttcctgttcagctttacgctgcatgcattgggaagctggcgcgccgaggaggccgaacagcagttgaagggattgccgccgccaggctttgtggagcacctcgccagcagcacattctggttcgaatccatgcagaactggcaaagcgagttcctggccgtgctgtctctggtggtgctgacgatcttcctgcgccagaaagattcgccgcagtccaagccggtcgaggcgccgcatacccagacaggagattgaaccatggcagatgatccgtcgacggccttgctgatcatcgacatgttcagccgtttcgatttcccgggcgcgcaggagctggcgcccgcggcagagcgggcggcccggcagatccggcgcctgagggatcacttcgacgaacgcgggtggccggtcatctacgccaatgacaatttctcggattggaagcgcgatttccgccagcaggtggaacagtgccggcgcgacggcggtccggcgggacgaattgccagccttctctcgcccttgcccagtcattacttcgtgctcaagcccaagcactcggcgttcctggccagtcccttgccgattctgctggccaaactgggcgtgcgccgcctgtgcctgagtggcatgacggccgattcgtgcgttctggccaccgcgctggatgccaatgccagagagttcgacgtcgcgttggcaccggaggtcgtggcggggctgccatcccggaagcggcgcgcactggcgctgctggctgatacgggcgcagcccggatcgcgcggctttcttcgcttgtctctgggcaggaagcaggaaggcgctgaaggcagctcaggcccggtcggctatcccctgtacgccggcatgaccggcgcaatgtgcacagcagaagatctggccatttccttcaacgccatgcccaatgaccgcgcatttgcagtgtgcgcagcggggtgcgaatgcgtggatcgcgcactcgaacgaatcgaacgtgccgctgcgcccgccctgctgcagggtaaagctcttgtcgtagttgttgccgcagacatcacaggtagccatggggcacctcgtgctgtggaaggaacatgcagtgtggcgagcgcgaatgtcggtggccgtgaatgcaccgtgtcgcgagggtgtaggacgtccgcatcgtcgccaagcgggcgcggcgtgcttcattggtcattgccgggctcggcactgttgccacgtggtgtgccgcgaccacagggaaacgccgtgcgcagcccttcgacaaccagtggcgacgcatcctgctgcaatcgctcgcggggcagttgccggagatgggaagacacatggtcgaccagttcatgcggaaggatctggccctgcccgcaccactgtccgcggctggcatcggcgacgcccaggatatagccgctggcgcgagcgctggacaggctccggcactgttcaccgtcgcagaacccgtcatcgcctttcccctgcaggagggtgatgagttccgtgccgctgacaagccaggtccgtgccggctgcgttgttccggccaaagcggacccagccagcgcgcagaggccaagtgcgaggagccgacgcatgacgcggcgcgcctggggttggtgatgtctcttcatgttgaggccctggctgttgctttcatggatgccacgcggcagaggtcaaagcagatcaagctggttgcgcggacgaaactccgggtcgtcctcggcttccagcatggcctccaccaatgtttcgaagggctcggtggcggcatccaggtctgcggatgacaggaatccggattccccggggccggccagcccaatcgcagcaaccgtctcctgctcaccttcctcggcccagagatagtcgtggatcagtgccacgccttcgtcgccccccttcaggaagtcggcggcgcctcgtgccacggcaagaaacgcgatgagatcgtaaaggctctccgaatacgtcagcgatcctgcgacaaagtgcgtagcagtgcggtcataggcggcaatctggatattcccggcctgtgcagaggcaaggaaagccttcaatgcggcgcgattgtcggggtagcgggccaacagcgcctggcaatccgcgagcaggtggtccaacgcctcgtcgctgcacgaggcaaggaattgaccgttttccatgcgccactgcccggagatgcctcgccagtcggaccaacgggatgatgaaggcacgggcgctgccagccatctggaaagatcgtggtgggaaatcttcaggcggagcagtgctgaatagggctctgacaaggcgatcctccactgtgtctgcgtacagttggcttgtagcagacaacgcatgacccgccaacatctggcggctgccgcaggccggtgccggactatcgcccagccgtcgaccctctcaccacgcaccttcccgtcatcaccagcctgcgcacgggcagctccggcatgcgcaggcgttccagcaacagcgacatcgcagcgcgccccatgtcttcaaccggctgctcgaccacggtaatgccaggttcgaccagctcggtccagcgctcgttgtcgaaccctgccagcgccagttctcctggaatggcgagaccggcgctgcgtgccgccttcaatgcacccatgagcagcaggctgttgctggtgaccagcgcgtcgggacgcgaagggccggccagccattggtcgaccgttgcgatggcggcctcggccgttggctcgacttcacggtaatccggctccaatccgtgcgtgcgcatcgcagcaagatagccgtcgcggcgctcggccgccgtggtgctggtgctgccgaacaggccgccgatgcggcgatagccacgctcgacgagatgctcgaccagggcgcccatcgccgcgggattgtccagcaccacgctgtcgatcgacccgctggccgcggcgcggtccaccagtaccgtcgggaagtccagcgtgagccgttccagccgccccaccgtggtccgtgtgggcgcaaagatcagtccactgatgcgctcctcgtgcatcaactgcaggtacagcgcctcgcgctcggggtcttcgtcggtgttgcagagcgtgacgcgcaggccttcgcgataggcgacctcctccaccgcacggataagcgcagtgaagaacgggttgcggatatccgcaacgatcaacccgatgatgccggtgtgccgggagcgcagccgccttgcctgcaggttcggccgatagccggtctggcggatcgccacctcgacccggccgcgaacctcttcgctgaccgggccgcccccgagcacccgcgacacggtggacttggatacccccgctacacgcgcgacgtcattgatgctgatactcattggaaacgttcccggaaaagtgcgcctgccatggcccggcggctgttcaggacaatgctaacgccaaatagctattggcgttttgtgcagtgcacattgaaataggcggtgggaacgttcccaatatgcccagccatccttttgccggagccgccctttgtcgccccagaccttcccctcccccgtcagccgggaactgatccgcctggacgcgcgggcgcaggacaagaccgatgcgatcgcccaggtcgcgcagatgctggtcgcggccggctgcgtggcgccagggtacgaggccagcatgggacggcgcgaagcgctggccaacaccttcctcggccatggcgtggcaatcccgcacgggcttggcgaggaccgccatctggtgcgccgcgatggcattgccgtgctgcagttgccggaaggcgtggaatggaatccggggcaggtcacccgtctggtggttggcatcgctgcccagtccgatacccacattaccctgctgcgccgcctgacccggctgatccaggatgaggcaacgctgcagcgcctgtttgcgaccaccgatgcgggtgagatcgtcaacgcgctgaccggcgacattgcgatcacgaccgcccaggtaccggccaccgatctggccgagcgctttgactggaccattgcctaccccagcggcctgcacgcgcgcccggccacgcgctgggcagagacggcgcgccgctttgcggcccgcgcccaggtgcgtgccggcgaccaggcagcggacgccaagagtctggtcgcgctgctgcaacttggcctgcgtcatggcgatgccgtcagcgtgtctgccgagggggcggatgcccctgccctgctgaccgcgctgcgcagggtcatggaggacctggtggcacaggaaaaggccgacgccgaacgcgcagcacaacgcaaggccacgccggtggcaggctggaatccgcccgaggcacaggctgccatcgtcggcatcggtgccagccctgggctggcaatcggcccggtgcatgtattggccagcacgcaggccgaggtcgccgatcgcccggccccgctcggcgaaggcggggcgcgtctgcaggacgcgctcgcacgtacccgccagcagttggccgcgctgcaggatgacacccagcgccggcttggcgcctcggacgccgccatcttcaaggcccatgccgcgctgttggacgacaccgacctgattacccgtacctgccagctgatggtcgaaggccatggcgtcgcatggtcctggcaccaggccatcgaacacatcgcctcgggcctggccgcgctgggcaacccggtgctggccgggcgcgccgccgacctgcgtgacgttggccgccgagtgctggcgcagcttgatccgtcggccgccggtggcggcctggccgacctgcccgcgcacccgtgcatcctgctcgcggcggacctgtcgccgtccgacacggccaacctcgacactacccgcgtgattggcctggccaccgcgcagggcgggccgacctcgcacaccgccatcctctcgcgcaccctcggcctgccggcgctggtcgccggggggggcgagctgctcgcgatcagcgccggtcgcgaggcgatcatcgacggcagcagcgggcggctctacctgtctccgtccgaggccgacctcgcctcggcgcgcgcgtggatcgccgaacagcagcagatccgcgagcgtgaagcggcgcaacgcgcgcagccggcacagacgccggacggccaccgcatcgacatcggcgccaacgtcaacctgcccgagcaggtgccgctggcactggagcaaggcgcggaaggcgtcggcctgatgcgcaccgaattcctgttccttgaacgtggcagtacgcccagcgaggatgagcagtacaccacgtatgtggcgatggccaaggcactcggcggccgcccactgatcgtgcgtgcgctcgatatcggtggcgacaagcaggtggcgcacctggagctgccgcatgaagaaaacccgttcctgggcgtgcgcggcgcgcgcctgctgctgcgccggccggacctgctggaaccgcagctgcgtgcgctgtaccgcgcggcgaaagacggcgcgcgcctgtccatcatgttcccgatgatcacctcggtgagcgagctggtcgcactgcgcgccatctgcgagcgccagcgcgcagcactgcaggcgcccggggtaccgatcggcatcatgatcgaagtgccggccgctgcggcgcagagcgatgtgctggcccgccacgccgacttcttctcgatcggtaccaacgacctgacccagtacgtgctggcgatcgaccgccagaatccggagctggccgccgaggccgacagcctgcatccggccgtgctgcgcgcgatccgcgccacggtggaaggcgcacgactgcatgggcgctgggtgggcgtctgtggcgggctggccggcgatccgttcggcgcactgctgttggccggcctgggcgtggacgaactgtcgatgaccccgaacgacatcccggccgtgaaagcacgcctgcgtggcagcgcgctggccgatctgcgaacgctggctgcgacggcgctggactgcgaaaccgctgagcaggtgcgtgccctcgatggagtgcgcgcatgagcgcccgcgccgtcaccattaccctgaacccggcaatcgaccagaccgtgcggctggcgcacctgcaaccgggtaacgtgcatcgcgcccgcagttcccgcgacgacgccggcggcaaaggcatcaacgtggccgcctgcctggcagactggggcgtgccgaccactgcgctgggcgtgctcggcgatggcaacgacggcgtgttcagcgcactgttttccgatcggggcatcgcagacgcgtgtctgcgcattccgggccgtacccgcaccaacatcaagctggtggaagatgccaacggcgagaccaccgacatcaacctgcccggcctgtcactgtgcgacgccgatctggacgcggtatcgcgccgactcgacgcactgctccagccgcagctgccggtggtgctgtccggcagccttccgtccgggctgcaagccgatgcatgggcccgactgcaggcgcaggtgcgcgccgccggcgcgcgcgtactgctggataccagtggcgacgcgcttgccgcggcgttgagtggtgcacagggtgcactgccctacgcggtcaagcccaaccgccatgaactggaggcctgggccggcacgccgctgctggatcgcagcgccctgcgcgccgcgggccgggccctggtcgaacgcggagttgcactcgtagcgatctcgatgggcgccgacggcgcgctgttcattgatcgcagcggcgccctggtcgcacgaccggcgcgactggcgcagggcagtacggtcggtgccggcgacgccatggtcgccggcatcgccgccgccttgttggagccctcccccgacctggccggttgtgcgcgactggccacggcgttctcgatgagccggctggagagtggcgacgcgcgacggctggacccggcgcaggtgcgcgcgtggaccggcgatgtactgatcgagcggttggattgaaacccctgcagagggggctgcggctggccttgggccaccgatggcccctgctgcaaggacgaacccgaagaattccaggagttgccatgcaagcttccaccgtagtcatcgccgctggcgaacgcagcatcgaggccgttcttgccgccgaagcgctgcgccgcgccgcacgccagcaaagggtcgaattggcgatcgaaatccgcagcaatcagggcgtgaccggggcactgtccgacgcgcaggctgccgccgcaacgcagctgctgctagtgggtgacggcgaggcggacagcgcccgcttcggcaatgcccagatcgtgcgcgccggcctcggtgaagtgctggacgacccgctcgccgtgctggcgcagctcgccgcagcatcggcacccccttccagggatgacgcgggcaagcgcatcgtcgccgtcacctcctgcccgaccggcatcgcccacacgttcatggcggccgaaggcctgcagcaggcggccaaggcactgggccacgcgatccgggtggaaacccagggctcggtcggcgcgcaggatgcgttgagcgacgacgaaatcgccgccgccgacctggtgctgatcgccgccgaccgcgaagtcgatctgtcgcgctttgctggcaaacgcctgttcaagagcggcaccaagccggcgatcaatgacggccagaacctgatccgcaaggcgctggccgaggctggcgtgcagaccggcacggtggcttcaggtcgcaccaccgagaaggccagggtcaccggcccctacaagcacctgatgaccggcgtgtcgttcatgctgccgttcgtcactgccggcggcctgctgatcgcactggcgttcgcgctcggcggcatctatgccttcgacgatgcacacaagggcacgctggcctggtcgctgttccagatcggcgccaagtccggcttcatgctgatggtgccggcactggccggctacatcgcctactccatcgccgatcgcccgggcatcgccccgggcatgatcgggggattggtggcagtcaacatggatgcgggcttcatcggcggcatcctggccggtttcatcgccggctacggcgtgcattggatcaaccgtgcgctgcgcctgccgcgcagcctggaaggcctcaagccggtgctgatcctgccggtgctgggcacgctgctggtcggcctgttgatgatgtatgtaatcggtacgccggtggctgggctgctggcctggctgaccgactggctgcgcggcatgcaaggcagcagcgcgatcctgcttggcctgctgctgggcggcatgatggcggtggacatgggcggacccgtcaacaaggcgtcctacgccttctctaccgcattgatttccagccaggtctacacgccgatggcggcgacgatgatcggcggcatgacgccgccgctgggtatcgcactggcgacatggctgttcagtagccgcttcactgctgaggagcgtggcacggccggtgccgctggcgtgcttggcctcagtttcgtgaccgaaggcgcgatcccctatgccgcgcgtgatccgctgcgcaccattccggcgctgatccttggttctgccgtggccggtgcgatctcgatggccgcaggcgtcgaactgaaggtgccgcatggcggcgtgttcgtgctgccgatcccgaacgcagtcacccaccttggcatctacctgctggcactcgtggccggcgtggccgtcactgcggtcgcgctgcgcgtgctcaagaagccggtcacggctcccaccctgtaaaaggaacccgcccatgacctccccttcccgccgcctgctgccgacagtgatcctgctggccctgccatcactggccgcagccgccgacgcgagcgacgtcttcgctccgaagctcgcctacaccggcgaagcggccgccacgctcgacggtggcaagcgcagcggcacggcctatgccggccagctgatgttcggtgccgacgtggacctggacgcggcgtttggctggcgaggtgcgacggtcaaggcctacggcatcaaccgccatggcaccaatctcgccaacagcagtacaggcaacagcacctcggtgcaggaaatctacggcggccagggcacgcgcctggccaacctgaccctcgaacagaagttcttcaacgaccggttggtgctggaagcagggcgcagcgtcgccaacatccaccacctgggttcggacctgtgccagtacttccagggcaactcggcctgtggcaacccgacctacgtattccgcaccagcagtttcacctggtggccggtgtcgagctggatggccgatgccacggcctgggtgacgcccgatgtctatgtccgcgtcggcgcctaccaggttgatcccagccaagccgaggatggccagcatggcctgaagtggaatacgaaccaggccaccggctggatcgtgccctacacgatcggctggcgcagccctgcttcggcacgactgaaagcccgctacgaactcggtggttggcaggacaactcgacctatcgcgatccgctgcgcgatgccaacggcattcccgcgctgctcagtggccaggagtacgcgacgcgtcacggtcgctccggtgcgttcgcccgcttcgagcagcaactcaccagtgatggtgccggccgcggcctgacccttttcggtgcggcgctcaagggcacctccggccagttgatcgaggatcatttcctgcaggccgggctggtgcagaaaggcacgttcgcccggcggccgcaggacagcatcgctttcgtcgtgacccagcagaagtacagcagcatcgcgctggaagacctgcgcctcgcccgcgccgcagccggtggtagcggcaccccgcacgggagccaggtgatgatggagctgagctatggcatccagctcaccccgcagcttcgtgttgcaccgaacctgcactacatcgtgcaccccgaccagttcaatgagcccgcacgccagcacgacctgccggatgcgctgatcgcgggcatgcggatcgactggaacctgtaggaaatgtcaggtggtcctggggcgcggcccgtgtcaggcaccgggtccacggccggtccaggcggcgtaccgaccgcccggcacccgggtgatcgcctgccctggccggggtttcaggtgctgtccgccgcccacgccagttcgaatgtcaacgcgaggcgctggccgggctccagccggtgcggtgccagggtgtagccatctggcgggccgctctgcggttcgacacaggtggcgtgcggcgtaccatcgtagaccacccagtggtcgtggtccgacctcagccgcaggtgctggccttcgcgtatcagcgtgacgtcaccgtcggcgatgaagcagtcatcccaggggccggtggtgggctccacgcggggcagcgtggcaataccttccctgtcccgcggatacatcgagcgaggactgaacagcagtcgttccggcttccggaaccaggggtgccagcccagcaccgccggcatcgcctggccgccggcctggaccgagaggtccatctgcaggctgtgagcctgcaactgcaggtccagcacggcagcgccaccgaaaggccagtagccgtcgctcggcagctccagcgacaaccgggctgccgccgcgtccaagcggtcgatccgccagggtcgcgagaaacccaccccatggatggcatgcccgtcgaagttgagcggcagccgatgcggcctgccgtcaaaatggaactgtccacggcggatgcgcccggcccacggcaccatcgggtagcagccccacgcgatcgccgccgggcctgcctgctgcgcatccaccagccattccacgccctggtagcgcaggtgcgccacgcgcccgcccgcccctgcggcgaacgcaacctccagttcgccgcacctcagccagtgcagctcgccggctggcagcggagccagcgcatcatccaccggcagcatccgctcaggccccatacgggttgatcgtgcggatgcttccgtccggctccatgtgcagcggcgtgcacttggccgagcgcaggtgggtgatgccgccggacatcagtgcatcgtgatagaacaggtaccactgtccttcgaactggcagatggagtggtgtgtggtccaaccgaccacgggggtgaggatcacgccagcgtaggtgaacggtccatacgggctgtcgccgatggcgtagcacagctggtgggtgttgccagtggagtacgacaggtagtagcgaccctggtacctgtgcagccacggaccttcgaagaagcggcgcgcatggtcgtccgcgcgcagcggctggccatgctcatccaggatctgcacttcgcgggtgggttcggccagctcggtcatgccggcatccaggcggcccacgcgcgggcccagcgccggtgcgctgccctcgggctcctcgtgggcctcgctgtactggttgtcacgatacttctgcagctgcccgccccatatgccgccgaagtacaggtagtggctgccatcctcgtcttcgaacacggccgggtcgatcgagtacgcacccttgatcggctccggctggggcacgaacgggccctccggccgcgcaccgatcgccacgccgatgcggaaccggccctcggcatccttggccgggaagtagaggtagtagcggccatcacggcaggcggcatcgggggcccacatctgtttccgggcccagggcacgtcgcgcacatgcaacgccatgccgcaatcgacggccgtgccgtcgggcgtatccatcttcagcacatgataatcctgcatgccgaagtggccaccttcgtcgtcgaatggctggccgccgtcgatgtcgtgcgacggatagatgtacaggtgcccctcgaacacatgcgccgaagggtcggcggtatagatgtgggtcaccagtggttgcgaaatggcgtgcgcggtgagctgcgcaagacgggcttcgctggcctggccgtcttcgccggcagagaggtcgatcatggtcgtcatcttggagttacacggaggcgtcggcggaacggcgacgcaggtggaggtcctgctcgatgcgggtttcggtgcgcttgtcgatcctgtagaagaccagcagcgccacggcgagcaggaaaggaagggagcagtagacgcttacggtcaggcggatgccctgcaccacggcctcaggctgctgcgccaggccggcctggtagccgtagtgggcgaggatcgcggcgaccagcgcgccgcccacgctgaggccgatcttcagcccgcacagcatcgccgagaagatgatcgcggttgcccgccgatggttcttccactccgagtagtccgcgacgtcggcgatcatcgcccacagcaacgggatggtgatgccgtagcagaagccatgcagcatgaaggcgccgaacgccaccgccaccgccgtgggtggaaacaggtagaaggcaagcaggaacagggtcgagacaaacagggcgccaccgaagacgtcgcgcttgccgaagcggtccgccaaccgtcgcgatgcgccgatacccaggatcatgcagaggatgccgcacgcgttgaacaggctgaacgccgaggtggccgcgtccttcggccaggtgaacgccgcgaagccggcgctggccagcgcagcattcaacgcgctgaccaggccgttgaaccccgagttttcaaggaagccggccagcgccgcttcactcatgtagtactggaagtaatagatgtaggtaccgcctttcaatgccaggttgatgaacaccagcacggtcagggccagcatcacctgccacgggcggttgtgcagcaggtccgacaggtcctgcactatgccgccggtctgttcgcgcgtcggcacgatgcgttcgcgggtggtggcgaacgtgatcaggaagaacgccgtgccgatgatggcgaatgcggtcatgacctgctcgaagccgcgcacccggtcgccgtcacccaggatcagcaccagcggcatcagcagcacctggatgatgaactgcgcgatcatcacggccacgaagcggtaggccgaaaggctgttgcgctgggccatgctgccggtcagcacgccgctcagcgccgagtacggcaggttgttcgctgcgtacacgcacaccagcagcgcgtaggtggccagtgcatagatcacctttccgcgctcgcccaggtccggcgtgctgaacgccagcagggacagtacgccaaagggaatggccgtccacaggatccacggccggaagcggccccaacgggtggacgtccggtcagccgcgatgccgatcaacggcgtgaacacgaacgcacccagcaggcccaccacgaagatgatcgtggccgcggtcgcggccggcaggcggtagacgtcggtgtagaagaacgccaggtaggtgatcagggtctggaagatcaggttggcggcgagatcgcccaggctgtagccgagcttctcgcgtaccgatagcgcgtgttcagtgcttgccatgcagcggacgtcctggaaaagggatctgggcggagggaaatcgatgccggcgagagcgatcagtcatgcgcggacaccaccgtgaacctgccctgcgcgcgtgcatcggcactggacgcccccaccctgacctcgtatgcaccgggccgcacctcatacgcggcgcgcgcttcgtcatagtggcgcagggcctgcgctgcctccagggtgaacgtcaccgtgcggtgttcgcccggggccagatggatccgctggaagccacgcagctcctgcacggcatcgccgctgccagcgtgctcgcgccgcacgtacagctgcaccacttcgtcaccgctgcgcgtgcctgcgttggtcacatcgaccgccacgcccaggcggccatcggcgcggaggctgcctgcatcgaggcggagcgttccatagtcgaaccgcgtgtacgacaggccgtgaccgaacggataaagcggcgtgccgcggaagtagcgataggttcggccctccatggcgtagtcgtcgaatgccggcaacgcttcgctggccttgtagaacgtcactggcaaccggccggcgggattgacgtcgccgaacagcgcctggccgacggcggtgccgccgcgctgcccggggtaccagctcatcaggatcgccggcagatgcgactgcgcccagtccacggcgatcgccgagccgccggtgagcaccatcaccaccggcttgccggtagcgtgcagggcctccagcagggtgcgctgcggcgcgggcaaccgcaggtcggtacggtcgccaccggcaaagcctggatagttgaccgtcatttcctcgccttcgacatcgccggtaaggccaccgacgaacaccaccacatcggcttcgcgtgcggcatcgagcgcttcatcgaacggcgccttggcgccgggcatgcgccagcccaggcgcacgccggcatcgcgctcgtcgtcgtagtactccagcgtcagcgcgtaggcacgcccggcctgcagctccagttcgatgccctcggcatgcaggcgatctgtgttcacccagtgatcgatcacgcgcttcccgtccaggtacaggcggtagccatcatcgccggccacctccagccggtagcggccggacacgggtggcagcagttggccgctccagcggatgctgaagcggtcgttcgggatcccctgccccggtgccgcttcgccgcgtgccagcaggttgtcggtcggcgagccgcggtcccagcggaagccgatctgcgcgtcggtacgcaccagggacggcgtaccggacaggtcgggcgtgcggaagtactcgccacgcaggccacgctcgggcgagtccgccgaaggccgcaggaaggtcggctcgatcaacggcgtggcaccgggatcgtcgcggccctccaccaggtccacgccgcgggcatagcgaacctcgacgcccttggccgcctcgcgtatgccctgcaggatcgtgaccggcgcggccggtgtgccgaagtagttgccgagcagcgccatggtgtcgtcggcagtgggtccgaccacggcaatgcgcttgatgtcgcgtgacagcggcaggatgccgtcgttcttcagcagcaccagcgacgcctgcgcggccttgagcgccagcgcatcatgggacggggcctggttcaccgaggccggaatgcgcgcccagcgcacccgctccggcgggtcgaacatgcccaggcgcatccgtgcggtgaacagacgggtcaccgcatcgtcgatctccgcttcgctgatcaaaccctgacgcacggctgacggaagcgtggcgtactcctggccgcattccagctcggtgccattcctgaccgccagcgccgcagcggcttcgcgcgtggtcacgatatggtggtgcttccagatgtcgacgatggcccagcagtccgagaccacgtagcccttgaagccccagtcgcgtcgcagcacatcgcgcagcaggaaacggctggcactggcggactcgccgtacacgcggttgtaggcgcccatcacagcatcgacgtcgccctccttgaccagcgcctcgaatgccggcaggtaggtgtcatacaggtcgcgccggctgggccgtgcatcgaagtgatggcggtcggcctccggcccgctgtgcacggccagatgcttggcggtggcgtccagcttgcggtagacggggtcgtcgccctgcaggccacgtacgaaggccacgcccatgcgcgcggtgaggtacgggtcctcgccataggtttcctgtccgcggccccagcgcgggtcgcggaagatgttgacgttcggcgaccagaaggtcagcccctggtaacggccgtgcgcgccttggcggaggaactggtggtgctttgcgcgggcctcatcgctgatcgtcgtggccacctgccccatcaacggcacatcgaaggtcgcggccaggccgatcgcctgcggaaagaccgtggcctgccctgcccgtgccacgccatgcagtccctcattccaccagtcgtaggcgggcacacccaggcgttcgattgccggcgcggcgttctgcatctgcgcggctttctcatccagcgtcatctgcgcgacgagtgaggcagcccgttgctcgaagctggccgaaacgtccagccagggccgcggcgcggctgcggatgcggccgccgcgatgcaggtcagaacgaacacagtgagcccgcggcgcaatgtgcggcgacgggcgttggacgacagcgacagcctcatttgcttctcccggtgcgctcatcgcgcgcgaagggacccagcagtgcgcctacgaagccgcctgcccggtccgtgctcagaacggtgccatccaccttgcctgcaagcagttgccagccctgcccgtcgccggtatcgaacgagaacgcgtagtcgccctcgttgccggcgatcttcaggcgcaacgcgtccggtgcccgcacctcgcgggtcgccacgatgcgcgtactgccaccgccatcacgaacttccaggaagagcgaaagtcgctcgtccggaaggctgcgaacgccaaggaagtaccagtacgcctcgctctggaacgccgccaggccggccgccacgccaggccccggccggctcatcgcggcgctcgcctcgaagcgcaggtgctgctggcgtcggccaaggaacgcgggattgcgcagcgtgtccagatcctcggcaagcgggtgcacggccagcattcccgggcgcgtggccaggtcggcccaggcgtgcttgggcacccgcacgcgcagccactggcgatcgagcctcggtccatcgaagttgtcgcgctcgacgaagttgccggtcgagggggcctgggatgcctcgccctgcatccacgacggcgccttgaccacgtaggggatgggctggtcggccggcaggatccgtggccagccgtcctgccagcgcaccggcagcagataggtctcgcgcccggtgttgtagtgccgcgtctgatagttgcggctggccaggaacaccgcccaccacgaaccgtccgggccttcgaccaggtcggcatggccggcattggtgatcggtagcggtcggtcgtcgggcagctcgcgctgggtcaggatcggattgcccgcgtaggggtcatacgggccccacacggtgcggctgcgcagcaccacctgggagtgctgcggcccggtgccgccttcggcatcggacaggtaataccagccctggcgcttgtagatgtggggtccttcgatccagatcgggttcttcgccggctccacgcccgcgtcgaccagcacccggcgcggcccgaccggcttgaaggcagccagatcgatctgctgcatccagatggcgcggtgcccgtcgtagcgcggcgggccgggcggtgcatcgttgttgaccaggtacaccttgccgtcgtcatcgaagaacagtgatggatcgatgccatcgatgccgggcagccagtgcggatcggaccacggaccggccgggtcgcgcgcggtggcaatgaagttgccaccactgtcggtggccgtggtcaccacgtagaagaccccatcgtggtattcgatggtgggcgcgaagatgccgcgcgagacgctcagcccgtcgaaatccagctgcgtggcgcggtcgatcacgttgccgatctgcttccagtgaaccaggtcggcactctcgaacaccggaatgcccgggaaataggtgaagctggaattgaccaggtagaaccggccgttcgcgctcacgatgctgggatcggcatggaagccggccagcaccggattgcggtagtggccgaccggcagcggcgtgtcgaaggccgcgtcgtggccgcggtattcgaaccagtcgaagtacaccggcggtgcgtccggcggcgcgctggccgggctggttgcggccgacagcaggagtgccgccgccagcaggtggcgcgccatcgacctcaggccggccctgtcgcggaccggaggggactgcttggacaacgtcatcatcgtcgcgtctcggcttcggcaatgggaagttcgaacgggcctgccggtgccccgctgcggtcgcgtagcgtgcacaccgggccatcggcccagcaatagcggacatgcgttgcgtgcgtcgacagcgggccgcgcagcaggatccggcgcccatccagttcggcgtcgccgtagtcgcagtggcgggtatcacccctggtcccgcacagttcaaaaccaatcggacgcagcgcgccggtcgcggtgagcacgccttcgacatcctcgaacgcaatggccacgccagcgggcgtccgcacggccgttaccgctcgcggacccgacggcgccacgtcctgcttgccgtacaccacgtggcgcgccacgcgcgccaggcggcgcccgagctcctgcttgttcggcggatggatgtcgtaggcgtcgccgatgtcgatggcaatggcgagcccgctccgcgcatcctcggcggcgacgcgccgttgcgcctcacgcacctgcgcccaaccgctggcggcgggcacaaccggcggctggccgtagccggccagctgcaccagcagcagtggcgtgcgcgcaccgaactgccgccgccagtcctcgcgcagcgcacgcaaccgcatcgcatacgccgcaccatcgctggtgttcgattcaccttgataccagagcatgccgcgcagcccgaagcccccgagcggtgcgatcatcccgttgtacagcgtcgacagcccggtggcggcctgccatggcgcgaaaggcggcgcctgctggcccgccgccacccggtatttccagaggccctgcagtgccacgcgctcgccgttgtcgaactgcaggccgtatgccgttgaggggccggccaggccgccttcgccgtaggtgtccagcacgttgaccgcaatgctgttggatcccgccttcaacaggccactcggcaacggatagcgcctctggccggcgccgtactggctgccgacggcgaccccgttcacccaggtcacgtccacctcgtcggccgatgccagctccagggtcgcgccgcgtgcagcctgttcagcgctcagcaccacctgcgtgcgataccagaccatgccgttgtaatcggcaagcgcgggctcgttccaccgctcccatgcgcccagtgtggccggtgcgtgcgaccatgcgcggtcatcggtatccgcgcgccaaggtgcgtcgcccggcagcgccccttcgcgcgtctcccaccagtgctgccagtggcggccccaggctgcgcgtgcctccagcggatcacgggcagagcgcgcgagaatatcgagggcctcgtccatgccaccttgcccgcgcagggcatcggtactggtccaggcctcgatccgcgagccgccccacgctgcctggatcagccccatcggtacggtaaccgtgcgctgcagttcgcgggcgaaatagaagcaggctgcagagaaaccgcgcaccgaatcgggcgttgcccgcgtccatccagggtcacccttgaagctctcctgcgcctgcacggccgcgtccttcggcacgctgaacagccggatccgtggcagcgtggccgaggcgatctcgctggctgcgttgagcgagcgccagaccggcagctccatgttcgactgccccgcgcacaaccagacgtcgccgaccagaagatcccgcgccgtctcacgccgggtcccggcggttgcctcgagggtgtacgggccgcctgcggcgatggcggggaacatggcctgccagcggcctgccctatcggcctgtgtggccaccgcctggcccgcgaaggtggccgataccgcctgcccagggcttgcctggccccagacggtgatcggccggtcgcgctgcaggaccgcatggtcctggaacagcgggtgcagcaaacccgtcgtttcgccggccgccaccggtgcggcaagccacgccagcaccatcaacgccgccgcgcgcgcggaccatccgaaccggttcatcgcccatctccgggtgcgaaaggaaactgcaacgcctggtagtacgacaacggctgtggcggtggccgttctcccgccggcagcggtcggccgctgactgactggaagtacgccacactggcatcgcgccaccactgcgcttcctcgcgctggatctgcaggaacgccgccacctgctggtgccgctgcggatcgatccgatcgcgcaggcccgcccaggtcgcctgcatcgactgcacctggcgcacaccccgcgaatagcgcccgaccagttcgtcccacagcgtcctgcccgagcgcatgcggcggtcccacggcacgtgatggaaccacagcagcagcgactcgggcacccgcgccggatcgccataaaccccggcaaccggcgggaagtactgccccacggcgttgcttccgcttgcgctgcggtcaaaaccgatgccgttgcggtctgcacggtggtagtagaccgacgtccagtccgcacgcgggccgccgtccacccaggggccgggaccgtagtgatggccgcgtgccatcaggtggtgcaggcccagcggcgtcatgtagtccactgccgcctcgcgcgagtccatcatcatccgcacgatcgggccggtcacctgcgggtcgggcgagaaggtcagcgcggcccagtcctcggcaatgccgcgcgcggactgctgcggattccatgccagtcgcccgaacgcgtaccagttggcctggtcgaaatgcgagccgctccaggtgcggtctacgccaatgttcgcaacgccggcgatgccggtcagtgcatgaccttccaacgagccgtcgatcacgcgggcgaccgtggagccctcgccacgtgcatgggtgtcggcctgcagcacttcttcgtaaagcgttcccaggtacaccaggtgcgtcgcaaaacccaggtactccttggtgatctgcagttccatcatcagcggcgtgcgtggcatggcgccgaacagcggatggaacggctcgcgcggctggaagtcgatgggaccgttcttcacctgcacgatcacgttggggcggaaggcaccgtccagcccgacaaactcgctgtacgcctgcttggcgcgatcttcgggaacctggtgcgagtacacgaaggcgcgccacatcactacgccgttgtagggcgccagtgcctcggccagcaggttggcgccgtcggcatgggaacgaccgtaatcctgcgggccgggttgcccctccgaattcgccttgaccaggaaaccgccaaaatccggaatgcgcgcatggatctcatcgaccttgtcgcgccaccagcgccgcacagccggatccagcggatcagccgttgccaggccgccaagctcgatgggcgcactgaagcgcgcgctcaggtagacccggatgccatagggccggaacaggtcggccagcgcggcggccttggccagataggccggcgacaggctcagcgcactggcattgacgttgttgaggacggtgccgttgatgccgagcgaggcgttggcacgggcgtagtcggtgtagcgcggctcacgccactgcggcaacgtctgccagtcccacagcgagctgcctgcatagccacgctcgacgtaacgatccaggttgtcccaatggttgagcacacgcagtgcgacctgcggcgactcacgcacatccagcgcctgcagtggggtgccacgctgcatcagccgcagcagatggaacatgccatacagcacgccgacatcctggcgtgccgccacaagcagcacgtcgcgcgcctcgatccggacccgccggatcaggaacccctcgttgcccaacgtggcgatctcgttgccgtacgcggcgacgagtgtcgaagattgcggcgtgcccagcaccagggcacgctcggtactgattgccgttcgcattggcggcgccgctcccagcaatccagggaggctgcgcgcaagctcgtcgcgggtggcgcgctgcattggcgtgcgatccggggccaccacttcggccagttgccgccggtaatcggcagcgaccgttgcggcaaccggctggtagcgcatccacagcgcatagccatcctccgcccgtgccccgccaacacaggccagcagcacgagcagggcccacaggtgcgtgccgacagcgcgcaacaacggcgttaacatgcgcctttgtagactacgtccgggcccggggcagcgcatcatcgtccttcgcacccgcacggcagcgccaccaagaacaaagggatcgtgcattggacaagccgaagaaatcggttcgccgcagaaccgcaggcgtgacgatcgacgaggttgcggcccttgccggcgtttcgccgatgaccgtgtcgcgggtaatcaaccagggcaaggtgcgcgacgtcacccgcgagcgcgtgctgcgcgccgtgcgtgagctgggctatacgcccaatcttgccgccagttcgctggccgctgcacagcacacgcgcattgcgctgatctacaccaaccccagcggcgcctacctgcgcgaactgctggtgggcctgctgcgcgtcgcctccagttccgccatccagctggtcatcgactactgggacaacctggatgccgaatccgaacgcagggcggcgcgtgcgctcgccggacgcgtcgacggggtgatcctgccgccgccgctgtgcgaatcgcaggccgccgtaagcgaactggtcaaggctggcattccggtggtggccatcgcatcgggtcgcctgagcgaggccttgtcctgcgtccgcatcgacgatttcagtgcgggcagggaaatgaccgatcacctgctccggcagggacacacccgcatcggtttcatccgtgggcgcgatgacctgagcgcaagtgcgctccgctacgacggcttcgtcaccgccctgcgcgaggccgggctggcggtggagcccggcctggtccagcacggtgactacacctaccggtccggcctggccgcggccgagaagctgctgtcccagcgccggccaccgaccgcgattttcgccagcaacgacgacatgggcgccgccgccatctccgtggcgcatcggcgcgggctggaagtgccacgcgacctgtcggtggtgggtttcgatgacacctcggccgccaccaccgtgtggccggaactgaccacgatccaccagcccatcgcctcgatggccaacgcggccatcgacatcctgctgcgcaccatccgccgtcctgcgggggacgcaacggtgctgcgcgaacatgtgatgccgcatcggctgatcgcacgcggttcggtagccgcaccgcccacgcgccggtagcgaaggccccgccctcatgcctgcgcctgcgcagtaggcggcagggtgccggtcaggccggcagcaatcatgcgccgcatccaagggcgacctcggcttcgttcagtgcgcccagcgcgacgcgtgacacggagatcgtcatcgcatcggccgtcaccaccgaccacggtcggtcgatcgcgtccagctttgcacccgccttggccaggcacttcagcggcacgccaacgcgcttccactggccttgtggaagcgccgccagcgacggcccgatggcgatgcgtgccgagcagcccacgccgcaaccgaccgacagccacgcctcaccctccggcgcagcgtccacgcgcagcgtggtcagcagcatcaggtcaccgttggattcgcgctgcaggtccagcgccgtgtgcgactgcagtgcagcaacggcctcgcccttgcccgaccaggccaggcgtcgcccatcctcctgcgccagatgatccacgccggtgatcttcagccgatcatcgggcaatgcgtccggcacgcgggtcacggtcaggccctggcctgcgccctgctcaaggcgcagcgccatgccggggcctgcatcaccgcgcgcgaagaacacgccggtcgcaccctcgttgccggtcacacccgatgcctccggcagcgcggccaggtcgccgttgtcggcgtaggtcaggccgaagccgaacgcaaacaacggatcgtagtccttctggccgacgttgttggcgtactgggtggcggtgcgcggccagctgaaactgagcttgcccttgaaatcgtgctgcacccggccatcgctcccgcgcagcagtacatcggcaatgccggcgccttccgagcccggcagccacgcggccacgaaggcatcggcggcattgatttcccggttcacccagagcggccgcccgctcaggaagaccgcgacgaccggtatgccatcggccttgagccgcttgagcagcgccagatccgtttcgttgcccggcttgtaggccaaggtgggtcggtccccctggaactcggcataggggtcttcgccaaacaccaccactgccacgtcgggtttcactgcatagcgaccgtcaacggcaagcacggcttcaccaccggccgccctggcctggcgcgcgatgccctcgtagatggagtctgcattggggaagtccttgcgcgtggtgccggtgccctgccagttgagcgtccagccaccggcctgcttgccgacatcgttggcgccgtcgccggccacgaggatccgctgcttcggcgacagcggcaggacgccgttctggttcttcagcaggaccagcgattcgcgcacggcctgccgggccaccgcgcgatgtgccggcgcgccgatcagtgcgaactggccgccaacggcccgcgtggacggcctgccggcctcgaacaaccccaggcggaacttgacccgcaggatccggcgcaccgcatcgtccaggcgctgcggcgttatccggccgtccttcaccgcagccagcgtcgtctcgtagaagcctttccagctgtccgaggccatcgccatgtccaggccagcgttgatcgtggccgggcagtccgtggtggtgcagcccttgacctggccatgaccattccagtcgcccaccacgaagccaccgaagttcatgcgtcccttgagcacatcggtgaggtagtgccggtgcccgtgcatcttttcaccgttgacgctgttgaacgatgccatcgcggtctgcgcgccggcggcgatggccggcgggtatccggcggcgtggatgcgcaccaggtccggctcactgatgcgggtgtcgccctggtccttgccgtcggtggtcccgccatcaccgagaaagtgcttcaccgaggcgatcacatggcggccatcgaggaactccggtgttcccaccctgccctgcaatccctccaccatggcgccggcatagctggccaccaccacgggcgattccgagtagccctcgtagctgcggccccagcgatcatcctggggtaccgcaacggtcggtgcgaacgtccactccatgccggtgacgcgggtttccagcgcggtgatgccaccgatctgccgcagcagctccggattgcgcgtggcgcccagcccgatgttgtgcgggaacaacgtggcgccaatgatgttgctctgcccgtgcacggcatcaatgccgaacagcagcggaatggccttgccgcctttcgacgtgtccatggaggcgtcgtagaaggcgtctgccagcgccagccactcggctggcgacgcatcgtagcggccaccggggtcggaattgccaccggccaggatcgaaccaaggcggtagcgccgcacgtcatcgggggtgaggctggcaatgtcgccctgcacgagctggccgaccttttcctccaccgtcatgccggccatcaggtcggtgatccgcttctccagcgcaggatccgcggccagtggccaggtgacctgcggccacgggtcgctggcggctcccgcagtggcggcgggccggtcctggccgtggcagcccagcaacgccagcgtcagcacggcgaccagcacgccgctgcgggatacggaggtctgcgatgtcatggcgctcatccttccatctgctccagttccttgcccttggtctcgtgcacatgccggaccacgaaaatcaccgagatgatcgccgccaccaggtagatgccgtaggtggccgccagccctgccgcggccagcagcatcgggaacgtcaccgtgaccacgaagttggaggtccattgcgctgcgccggcgaccgccagtgccgaaccgcggatctggttcgggaacatctcgcccagcatcacccacatcaccggcccccacgacaggttgaagaacacgacataggcattggccgccaccagcgccagcgtgcccatgcgcccgggtagctgcagatgcccgtcggccagtgaaccacttgcaaacgcgaccaccaccagtgcaagcgacagcgacatcccggccgagccgaaccacagcaggggcttgcggccgatccggtcgatcagcagcaccgtgaccacgcaggcaccgatgctcagcgcgccggacagcacgttgatcagcagcgcgtcgttttcggaaaagccgaccgcctgccacagcacggcgccgtaatagaacaccacgttgatgccgaccagctgctggaagcaggccagtccgacgccgacccacacaatcgggcggatccgcccggttgcccggctcttcagatcggacaggcgcgggcgatggtggtcgttggacagcgaggcatcgatctcttcgagcgtggcgcgggccttgtcgttgccgagcagccgggtcagcacgcgcagcgcgtcgtccttgcgccgcttcaccaccaggtagcgcgggctctcaggaatggtcagcaacagcagcaggaacaccagcgatggcgcggcctgcatccagaacatccagcgccaggcagcctgcccggcccacagcggctcggtcgacgcgcccgctgcggccgccagcaggtagttggacaggaaggcagcggtgagcccggtgatgatcgcgatctgctgcaccgtggccaggcggccgcgatagcgggccggagcgacctcggcaatgtaggccggcgagatcacgctcgccgcgcctaccgcgaacccacccaccacccgcgccgcaatgaaccagcccgacgccgccgccgccccggcaccgagtgccgacagcaggaacatcaccgccgacaggatcagcacgttgcgacggccgaggcggtcggccaggcggccggcactgaacgcgcccaccgcacagcccagcagcatcgacgcgatctcgaacccctgcatccattcaccggaccggaacgcctggtgcaggccgtcctgggtgccgttgatcacgccgctgtcgaagccgaacagaaaaccgccaatcgtcgctaccacgctgatcagtacgatcagccgggtgttctcaccgctgcctgctgcctggttcattcccgtccccttgagtgcaccgttgccgcgctcagcgcagcaggtactggttgagcaggttttcgtaacgctcctgcttgccgctggcctggtgcggttcgccgaggcgggcggccaggcccgccaggtccggcaggctgagcgcgccacgctcgaactcctggccggcgccgctgtcgaaactcgcgtagcgctccttgcgccattgctcccagggcgactcggtcagcagtgcatgggcaacctccagcccgcgtgcgaacgcatccatgccgccaatatgggcaatgaacagatcctcaaggtcggtcgactcacggcgcactttggcatcgaagttcaacccgccctccagcccgccctggcgcagcacgaccagcatcgcacccaccgtgtcgtacagatcgctggggaactggtcggtgtcccagccgttctgcgcgttgccgcggttggcatcgatgctgccgagcaggccatggtcggacgcaacctgcaggtcgtgctcgaaggtgtgcccggacaacgtggcgtggttggcttcgatgttgagcttgaagtccttgtccagcccatgctccttcaggaagcccaccaccgtggcactgtcgaagtcatactggtgcttcatcggctccatcggcttgggctcgatcaggaagttgcccttcaggccgatgctgcggccgtagtcgcgggccatggtgaggaagcgcgcgaaatgttcgatctcgcgcttcatctgggtattggccagcgacgcataaccttcgcgtccgccccagaacacgtagtgctcgccgccgagttcgaccgtggcctccagcgcggccttgacctgcaccgctgcgcgcgcgaccaccgcgaagtcggggttggtcgatgcgccgttcatgtaacgcgggtgcgagaacaggttggccgtgccccacagcagcctgacgccggtggcctcctggcgcgccttggccagggccaccatgtgcgagaggttcttctggtactggccgatgtcgtcggcatccggcgccaggtcgatatcgtggaagcaccagtacggcacgcccagcttggtgaagaactcgaacgccgcgtccaccttcgcttcggccgtggccagtggcgaggctgcctcccacgggaactgccgggtacccgggccgaacggatcgtgcccggcattgcagaaggtgtgccagtagcacacggcgaagcgcagatgctcctgcatggtcttgccaccgatgacccggtttgcatcgtagaccttgaaggcaagcggattgtccgagcccttgccctcgaacggaatgcggccgacgccggggaagtactccttggcgccgatgaagggctgcgtgctcatggtgcgtgctcctgtcgttgtacggggtgtcgtggaggagccatcagccgcgctgcagcggcgtgatggcatcaagatggctgaggaagcgtgcgtaggcccgtgcataggcagcgctgcgatccggatccggccgtgcggactgcgcgggatcgacggtgacgtggcgcgcggtgatgtcgctgatcgaggcggcgtctccctgcgcccgggcgagcgcccacagcgcctgcagtgccgcaccaaacgccgcgccttcggcctgcaccgggacgtccaccggcaggccgaacacatcagccaccagctgacgccaggccgcgctgttgctgccgccgccggtgagcacgatgcgatcgaactgcatgcccgcgcggacgaaggcgtcgtagccgtacttcaggctgtaggtcgcgccctccatggcggcgcggtagaggtgcgccggggtgaaattggcgatgtccaggcctgccagcacgcccttgccgagcggcaggtcgggggtacgttcgccattgaggaacggcagcatcaccagcccccctgcgcccggcggcgtcgcgtggaggtgcgcatcgccgtcgcgggtgctgaaaccgaaggcgctggccgcgcgttcggtggccacggtgcagttcatggtgcagatcagcggcagccagccaccggtggacgagcagaacgccgcccacgcgccgtccggatcgatcattggcgagccggaatacgcaaacagcgttccggaggttcccaggctcatcgccagccgcccttccgtgacgcagccggtgccgattgccgccatcatgttgtcgccgccaccaacggcaatcttcacggccgccggcagccccaactcggccgctgccttcggcgcgatatcgaacagggcatcgggtgctgcgatcggcggcaggcaggcggcaagatcacgatcaggatcggtggcgcgcagcagttcctgcgaccaggtgcgtgtgcgcacgtccagccagccggttccggacgcatcgccaagctcgcagaaccgctgcccggtcaacacgaaattcaggtagtcgtggggcagcaggatggtcgccagccgcgcataggcgtcggcacggcggatccgggtccagggcagcttggacgctgtgtagccggccaggatcggattgcccgccagcgcgatggtccgttggaacccgcccacggcgtccatgatctggatgcattcggccgaggtgctggtgtcgcaccacagcttggccggcgccagtacctcgccagcatcatcaaccggcacgaacccatgctgctgccccgataccgccagtgcgacgatgcgagcgcgcagcgaggggtcgatcctggcaaagcagtcgcgcagggccgacacccagtcggcaggcgcctgttcacggctgccgtcggcaccgctgtccagcgcgagcggcacgctggccgaggccaccaccgcctgcgtccgcgggtcatagaccagcaccttcaggctctgcgtccctgcatcgatccctgcaaccagacccatcgaaaccgcctccgatcaaaaaggtagcgctaacattccgtggactcaaaaagggggcgtggtgtccggccccctcgttgccaccgcgcgcgtcatcgccagcggtgttgccgcactgtaaccagctgcagcggaaaaagcgtgctgcaacgcaaaaccctgctacgcgcttgctgccgtcgaacgccacacgtccacgccggacctgcagtactgcgcgatgaactccgcctgcgccggcatctgcgcggcagcctgctgcacgggctgctggatacccttcaacagggtgcgcagatcggcgtcgctcacggcccgcgccagcgggtgggcgggaccgggtgcgatgccctgcccgagcagcacgctggtccaggattccacgcggaaaacctcgccggggtcctgccacgcatgtgcacgctcgcgccacgcgctcagccgctgctgcagcgattcgggcacgcgcatttcgcgacacgccttccacatcggttcggtgcgctgcgttgcgtggtagtgcaggatgatgaagtcgcgcacgtgctccatttcctggcggctgacatcgttgtacagcttcaccagcgacgcactgatgccgtcgaacgggaacagctggatcaggcgcactaccgcgctgatcgtcagatggatgctggtcgactccagcggttcgatgaagccgctggccagcccgagcgacaccacgttcctgttccaggccttcagccggcgcccgctgcggaacggcaccttccatggatcgcgcaagggtggagccccggcatcgcgcagcagcttcgctgcggcctcgtcatcggacaggtggcggctgtcatacaccagcccgcagccaacgcggtgctgcagcgcgatgtgccagcgccaccccgcttcgtgggcgatcgcccgggtatagggcaccggcggcgccaccgcttcggtctgcaccgccacggcacggtcgcacggcagccattcgtgccagtcctcgtagccggtgcccagcgtctgctcgatcagcaggccacggaagccggtgcagtcgatgaacaggtcgccctcgatcacctggccgtcgtccagtaccagcgcctgcaccgaaccgtcgtgcgcgtgctgcctgacctgggcgatcctgccttcgatccggtgcaggccgtgggcctcggccctgcggcgcaggaaccgcgcatacaggctggcatcgaaatgatacgcatagctggcctgcggctgggtatgcagcgagaagcggtcgccatgcgatgcgatgctctccaggctgaagtcgcccagctccgagggcatgccgcggcgcaggctgtccagccagaagtgatggaagggtgccgcccaggtgccgtggccgatggtgccgaacggatggaagaagcgatcccccggcaggcgccagttctcgaacgagatcgacagcttgaaggtgccggccaccgcgcgcaggaactcctgctcgtcgatttgcaggaagcgatggaaggtgcggatcggcggcacggtggactcaccgacgccgaccgtgccgatctgctcggactcgaccagcgtgatctgcagctcgtcacggaactgatgcgccagcgcgcagccggccagccatcccgccgtaccgccaccggcaatgaccaccttgcggatgcgccctgcaggcgtgctctgggtatccaacacggtgccctctctcaacggttgagcctgcccagcagcatcgcgcgcatgcggcgggcgcgctgctcgtcgaacggtgccagatccccgcgcgccgtctcaggcaggtgctgaccggcgcgctcgccggggccgaatacgtagtaacggaagagcccttcccaggcctgcttctcacgcgctggcaggtcgcgcacggaccacatcgcgtgctgcagcgccgccagcggcgaccccagccaggccggcgagcttcgccaccagtagttcaccagcacgttgaacggttccaggctgcgtacatggtgccaccacatgctgggaatgaagatcgcatcgccgggcccaagtaccgccctgcgtgcatgcgccagcgcctcgcggaagcgtggatgccgctcgtagtcgggctcttcgaagtccaccacgctcactacctgcccccccggcgtgggttcgagcgggcccggatagaggttgtcgacctgggcgggcgggaacagcgtgaactcgcgctgccccaccgcgcagcaggcgaggttgtcgggtgtgtcgaaatggcacgaggccgtcacccggttgccgatccagatgctggcggtggcgtcgatgccctgcttcgccagcccggcatcgttggcctgcgcgaatgccggcagcagtgcccgcgtgatcggcagcgaggccacgtaataggttggcggccgcggcgcatgcagcgtcgcggcgatctcttccagcacctgggcgagtacaccgcgccgcacttcgaagttcagccgggtgaagtccgcgctgtagaacgggcggcccgcgatctcggcgccgccgaacgagtactggatgggcgcacccgcatcgacgctgcacaggtacgccatcgcgtcacgcacgccgcccagtccggcctggaccagtggccaaccgctggcgatgccgcgcagtacgaccggctcaccggcctccaccagggcggccaatggcaaggcagcaggatcgatgccttccaggctccgtatcggcaggcgggcttgcaccggtcagttcctgaccgcctgcgcggtgccgtcctggacgcggagacggcgctgcttctcggcgatcaggcggcgcatgttatgcagcgaggcaagcatcaggtacgcaccttccaggtaaccggcgcggttcaacgccgccaggcgtgaactgtccagcgccgccagtcgctcgcggtcgatgccgtgcaatccgctcacgcccacgcggtgatgcggcgcgagctgcacatcaagcgtgaccggctggatgaggccacagtcgtcgagcatcgtgaacatgccggccgtgaaggcactgccctcgtggatgccgcgcagcacgccagcgatgtggtccaggtaaggcgtgtttccaccctgcggcaggaacaccggctcaccggcgccggaggtgacacgcggatggtccaggtcgacgtgcatcaccgcgtcctgggtgagcaggccgtccacgtagtgctcctggaatccgatcaggaacggcccttttgcggccgcgccgggcaggtaggaggcattccagcgtccgtcctgcaggtacaggttctcgtgctgctcgaaacccagcagggccacggactgccacgccccggtcccggcctcccggcgcaggaagatcggatactcgcgctgcagctcggcgaactcgctgggataggccggcaccatgcccaccgcatcgccgaactgcggcccgaatccggtggcgaccttcaggtcccgatgcgcgatgttgttgagcatttcatagcgggccatcagggtatccagtccagtgcggggtggctggtcagcagggtagcgcaggcgcgcgacaggtgcggcgacaccgtcccggcacggcaccgctggcgggcagcggtgccgtgccggacgcatcggcaaccaggctcagaacttgtaacggacgcccagcatgtagcgcgggctctggtcggccagcttgacgatcatctgcgaggtgcgcgagcgccaccgcacatcctcgccggtcaggttgatcgcctccaggctgaaggaccagtggtcatccagcgcgtagttgacgctgagatcccactgctcgtacggctccacatagtacggattgcggctggagccctggttggccaggatcaggtactggtcgcgccagttccatgccaggcgcaccgaccacccgtacttctcgtacatcagcatggcgttggcagtgtcgctcaggccggtgagcgagaactggtcgatacccggatcgccgccattgttgtagccgacatcacctttgaccacggtgtagttggccagcacgccgaagccggtgtcaccgaagaagtactggccgcccagttcccagccatgcagcttggacttgttctggttgatcgggcgattgacgttgaactggtacagcgggtcgttggcctgcccatacagatcgtaggccgcttcggtggccagcacctgcgcatcggtgccgttgtaggcgcccaggccggcaggattgttgcgcagcagcgccagtgcggtgaacagcgaggtgtcgttggccgagcaggcggcggcattggccggcccgacctgggccacgcaggcgccgctggtcaggaagtccaacgccgcccgcgcatccggcccggaggtcgggtcggtgagcccgtacaggctttcctggacgaccgtgttgccgatgaagttgctgaccgacttgttccagtaggtcaatgacacatagctggcatcggcgaagtaccactccagccccaggtcgaggttgtccgattccagcggcttcaggctcgggttctgcgaattgccgctggcgcgcgacgacggatcgatcagcaccgagccgaacggctgctgggcaccgggccctgcatacaggttgccgtacggcgcgcgggcgatgctcttgccgaacgaaacgcggcccttcagttcctcggtgaggtcgatgctgaaatcaaggttgggcaggatgtagctgtaccgcgccttctcggtgaagggctgctgctcgtcggacagcacgatgcggaaatcgttgttggcctgccactcgatggactcgggaacggcaatgaccgaggtcgacaccacgtcggtggtttcatagcgcacgcccaggcgggtattggtgcgcatgccgcccagctccccgtccagctccacctggaagtacgccgccttggtcttctcttccacgaagttgtcggccgcgcgttgcggatccacgcccaggccgacgccgtactcgcgcgacgcccattgcgcgagctgcccggcattgccgcgccaggccggccagctgttggcactgtagtcatcgaacaggccgacgatgctgaccggctgcagcaggtccatcaggccggcggcagtatcccggtccacgttggccacgccccagtcgcccagtgtcgaataggcctcggcggcctggatgcggtgggtggtggacttgttcgtatccacgccgaactggaagcggccgtggtcgaagttccattcgccgtcgacacgcgcctgcttgatcttgctgatctgggtctgcgcgttgacgcgcagcacctgggtgccgatctcgccttcctggaagcccgggttgaccacgccattggtcccggcaatcgcatcggcagtactgggataccagacctgggtgccgaccggcaggccattgttgaagttcaactcctgtacccaggagccaccgcaatgcgggccacgggtgcagttgttggtgccggcaatgctcatgaagatggagccgccgccggtcagtgggtcattggggcggctttcattcttcgaattgtgcgcatcgaagctgagcttgaaacggtcgctgacattccagaccgcgttgaagcccagcgagcccagcttgtactcctgcatgctgcgctgctgttccagcccgaagtccttggtgccggcgatctcgcggatgtagaccggggtggcgaccgcaccggaggtgtcgaactggacattggtgtagttgctgttctgcagccacatgccctgctcgccacgattctcggtgatctcgttggtcgagtaggtgtaatccatcgtcagggtcaggctgtccgtcggtgcgaactgcagcacggcctgcccattgactcgctcgcgctcgaattcggagaacgcgtagcgcaggtcgttgggccgcgcatagagctggccgacggccggggcgttcaccacggtcgggttgcccggcatcgaccccgtccagggctgcacgttccagtagttctccgtggcctgcaccgagccgcccttgcgcttctgctggctcgcgctgaggctgacgccaaaggtcttttccggattgctgtaactgaagatgcccgacagctccggcgtcaggtcgttgtcgaacggctggctctggtcggagaccagctttgccccggcattggccacgatgccggcgtggtcgagcgggcgagaggtcaggatgttgatcgtcgcgccgatgccaccgctgggcacctgtgcctggctggtcttgtagacctcgatgccattgatggcctcggcggccagctgcgcgaaattgaaggcgcgagtgccgccgtcgacaccgccgatggccacctgcccggaggcaccgaatgcatcggcgccgggcatctggcgaccattgagcgtgaccatgttgaactgcggcccaaagccacgcgcggtcacctgcgcgccctcgccgtcacggcgctcgatggagatgccggtgatgcgctgcaacgactcggcaagattggtatcggggaacttgccgatgtcctcggcgctgatcgcgtcgaccacgcccgccgagtcgcgcttgatgtccatggcctggctcaggctgttgcgtatgcccgtgacctgcactgcatcgagctgggtgggctgcgactggctctgcggctgctgcccggttgccgttgctgcgtcctgcgcaaacgcaggattgatgaccagggcgccacccacgaaggtgaacatggcccgggaccggaacttcgccaacgcgcggctcatgaaccggacctcgggcccggggtgccacggaaactgcaagtgctcatgaaagtcccctctgacatacgatcgaatggatgtaccgccccctcccaggggcacgcacgggcgtggcccgcattccaaaccgaacagcacggctgctggagcacgccgcgacttacacttgcttttcaagcctgccaggacaaacacgcggcaaagaaggcagcccctggaccctggatccccgtccgactggtagcgctaccatcgcgttgcagcggagagtaatcacccgggttcgcgcttgtcaccatgcagcgcagcaaatcggcagcgcgcgtagcggcgctggaatcaccccgctactgatgaccgggctgctgctgcatccggtcaccgctctcccgccgcaggaaagatgcccgcgcctgcgggtcatccagaaaggaacgcaccgtgaacgctctccagcgcatcgccgccgcagtcggctcgccgtactcgttccgtccggctccgccgttttcgcggccaacgccgtgatcgtggacggagcagatgagccgctcaccgtggtgctacgcaggggctaccactccggtcccagcagcttcatcacttcgacctccagtttctgcgcggcctcgtcctgggaggcgaccttgatgcacagccccgactgcgccggcccgggcatcagctggtatcggttgatggtgccgcccccgtcgccgtccagcgccacgcgcgccagcaccgtgcgcccattggcgtggaaggtccagtcctggtaatcaaacatgcttcagtatcccgtcggccaaggggtcatcccaccttaggcggcacgacagtgaagaaggctccaggaagttgttcagagcgcgtggacatgatgatggcagcacctactgcagtgcccgcgccaattgcaggacatcggcgaagaaggacgcgtagtcgtcctgtggggcgcggtggctctcgcgccgatggatcaggcgcactgcgacgacgcgttgttccggaacgatgatcaggtattggcccaggtagccgttggcggcaaagccgacgaccggtccccgtgtgatgtcgtagagatcggcgagcttcaggccgcgcgcggtgatctggctggcgtaacgttgcggcccgtctgcgcccaaccgttcggtgaggaatgcgatcaactgcccccggctgtcgaacgtgcgccccgcgctggcctgcacggcgcggcgcacgtcatcgtcaacgccgtgcccggccagcaggtcatccagccggggtttgagctgatagcgttcccacgctggtatccgccaccacaacaggcccacctcaggcgagcgggcactttcagcagtgatcaatgccactgaccgttcactcaacagtcgtttgccatccggcgccacgcctccatccagcaacagttgcccgatggcggcaagatcggcggcacgcagggacaggcccgccattcccagcggagtgcctgcctcatccttcatccaggtgtggtgggcaatgcccagcggcttgaacaggcgcgcatccaggtaggcatccagcggctcgcccgccaggcgctcgacaatgccgggcagcaggttggtggccttgttgttgtaggaaaacacggcgcccgggtcgtcactcagctcggctgccagtgccagtttgaccaggtccggggccccttccagttcggcgcccgcgttggccacgttctgcaggccggaggtgtggtccagcagcatgcgcacggtgatgcggctcttcctgccctgtttccattccggatagatctggctgaccggtacgtcgatcgaagccagcttgccttcgtccagcagcaacgcaatgcccagcgcgacgacggacttggttgccgacatcaggtgcacggattcctgcgcgggggcgggcttcagctcaagcagcgtgtcccggtcatgcatcacgagcaacgcatcggaatgcgaagcacgcgcgttgcgctcgatcgtggcgagggcgtcggcaggcggcgtcgcatgggtgggccccgcgatgccgatcacgagggccagggcgcaggacaaccagcaggacgttggcattgcgttctcttccagtgagtgtgcgtgcagtgtgactacacatgtagtcacaccgcagtgcctgaagtcatgccgcgcttgattgcctatccgcaccggacaccgggttcgtcaccaacgcgcccggcccccagcagtcgccatgccagtgcgcacggtatgatgcggcgatcccggaacctgcgatgattgcagcggccgcccatccgctgatcgcgtgcgccaggagcacctgcgccggggtcgctgccggtgccgctgaagcccccactccatgctcgccccccattcccccctcgtgatctgggcagcggtcgccgttgccaccatcggcctgctgttccgtcccttccgcatccccgagtatgtgtgggcgctgggtgctgccgccctgttgccgctgctgggcgcggtatcgctgcagaccgcatggggcgcggtagccgaaggccgcgacgtctacctgttcctggtcggcatgatggtgctggccgaactggcgcggcgcgaaggcctgttcgattggctggcgttgtacgcggtgcggcatgcgggcggatcggggcgacgcctgttcgacctggtgttcctggtcggcacgctggtgacggtgttcctgtccaacgatgcaacggccgtggtgctgacaccggcggtctacgcggcctgcaaggcggcgcgcgccaatcccctgccctacctgttcgtctgcgccttcattgccaatgcggccagcttcgtgctgcccatctccaacccggccaacctggtggtgtacggccagcacatgccgccactgctgcagtggctggcgcagttcgcgctgccgtcggcggcggcgatcggtgccacctacctggtgctgcgctgggtacaccggcgcgaaatcgcgcagccgctggtcgccgcaccggaacatcgcccgctgaccgagggtggccgactgagtgcattgggcgtgctgttcaccggcagcgtactgctggtgacgtccgcgctgaacggaccgctgggcctggccacgttctgcgccggcgcgctgagcgtggcggtcgtggtgatacgccagcgccatagcccgctgccgctgctgcggcatgtcgcctggggcgtgctgccgctggtggccggtctgttcgtgctggtggaggcggtggcgcagaccggcgtcatccagactgcggcaagcgcgctgcaggccatggcgcaggcttctccccaccaggccagctggctggccggtggcgccgctgcactgctgagcaacgtagccaacaatctgccggtcggcctggccgccggttcgctgggccagatggctgaactgcccgcacagacccgtgccgcactgctgatcggcgtggacctgggcccgaacctgtcggtgaccggctcgctggccacgatgctgtggctggtggcgctgcgccgcgagggcgagcatgtcagcgcgctcgacttcctgcgcgtcggcgcgctggtgatgccgcctgcactcatcgctgcgttgttgctgctgtgaccagaatgcaggcggcggcccggccctagaagaccagctgcagacgggtattgaaggtggtgccttcatccctgcccgcagcactgccgctgcggtggcgggtctgccaacgcaccgcttcgaacatcacccggctgaaatcgttgaggtaccagttcgcgcccagtgtccacgcgtgaccggtaccaccactgggcagttcggcatagtccacgtcctcatagcggcccttcagctcccacgcaccgctgccgccgcgcgtcaccggatcggccaccttcaccttgccccacgtcccggccttgcccgagtaggacggcagcgcgcccgccaggaaccagccggccgagatcgcccacgcttcgtggtcgcgatcatagcgcccgctggcatcggccccgcgcaggcttcgcgtaccccactcgccggttgcccacgccgggccgaagaagccggccagttccgcgccgtaggcggtgctgcgctcggcgcccaccagcgtgcccggtgtgatcctgaccagatcgttgaaatgccccgcgatggccgaactgcgcaccacgccgctggccccggcgggaatcttctcgtggaaggcccatgcgcccagatgcaccgtggcgtcggcggtgtccagcggattccagtggacgcgggtggcccaggtctggctgtcgttgtcggtgccggcgttgttgaggtcgttgccggccaccgacaggctggcatgccagccccttccatacacccgctcggtgagcccgacaccaaacaggccgcgctgcggcagcagcagcgtgccgaccacgttgcgttcctggaacggcgtgttggaggtgctgcttgagccatcgataccgcgatcgttcaagcggttgccgatcgtgagatcggccggcaggccgaacagcgtgtggtccagcgtggcgtagaccgacttccacgccaccgcgttgtcggcgaagtcgccctccacgacccagcccagggtgccgtagcgcccctcggcccccaggcgcaccgaacggatctcggtacccgaaacgttgcggtcggcgcccgccgaaccgtcggtgctcgaggcatcgacgaacaggcggccacgggggcggaacaccgtcgtgccgtcggcactgctgaactccggtgcacccttggcccaggagaccttcggcagcctggactggctggtttccagtgcggccacccgcgtttccagcgcaggcgcgggcggcgttgacggtgccctcgcactgccctgcccgccctcgacggcgcggaggcgtgcttccagttgctggatctgcagtgcctgctgctgcaccaggcgtgacagctcggcctggctcagcggcgcgggcagcgacgacgtggactgtgcgtcggcatggccactggccaacagcaggccgagcgcgaccgacagcgctgccagcggcagcacgttggaatggttcatgggctctctccggccagccggccccctggcctggcgctggcccgttgcggtagtgcgggggaagatcggggaaggaagcgcgcgccgccggatcggcccggcggcgcggcaggcgggctcagcccgtccgggtcagctggtggcctgtgcctgggcgttgggacgccaagtgatcagcttgttctcgaccacgtccagcagcgcgtcgatgaccagcacgaaggcggccaggatgatgatgccggcgaacacgcccacagcgttgaagttgccttctgcctgcgcgatcaggtagcccaggcccgccgaggcgccgaggtattcgccgatgatcgcaccgaccacggcaaagccgaccgaagtacgcagcgaagacaggatccagctcgccgctgcggggaagtagacatggcgcagcaggtcactgcggctcgcccccaggatgcgggcattggccagcaccaccggattcacctcgcgcacgccctgcatggcattgaagaacgtggtgaagaacaccagcgtgaccgccagcgccaccttcgaccacagccccaggcccagccacagcacgaaaatcggcgccagcaccacgcgcggaatcgcgttgaagcccttgatgaagggatcgaggatgcgtgccgagcggcggctcaggccgagccagacgccgccggccacacccaggccggtgccgatgatgtagcccagcgcggtttcggtcagcgtgatgtagacatgctgatagaacgacgtatcggacagccaggtccaggcctgctgcacgatggcggttggcgatgggaagaagaacggatcgatcacgcccagcgcgatgccgccttcccagccaccgaacacggcgaccaccagcgcgagctggatgaacttgtcagtcttggcgtgcatagctcttctccacttcgccgcgcaggcaggcccagatgtcgcggtacaggtcggtgaaacggtcatccagcttgatttcggccacgttcctcggccgttccagatccacatcgaaactgcgcaccacgcggctggccgggccggaggacagcaccaccacgcggtcgcccagggcgatcgcttcttccagatcgtgggtgatcaggatcaccgagcgccggtcttcctgccacaacctcagcagctcgttctgcatgaggtggcgggtatggatgtccagcgccgagaacggctcatccatcaggatcaccttcggctcgacgatcaacgcctgggccatctgcacgcgcttgcgctggccaccggacagctggtgcgggtagcgatgctcgaagccggccaggccgaccttggccagccacgcgttggccttggccttgcgttcggcctcgggcacaccacggaagcgcaggccgagttcaacattctggtacgcggtcttccacggcagcagcgcgtcctgctggaacaggtagccgaccgactcctgcacgccgctgacggcacggccatcgatgctgacctggcccgacgacggcttcagcaggcccgccacggaattgaggatggtgctcttgccgcagccggtgggtccgacgatggcaaggaactcgccgtcacccacctggatgtcgacatcgcgtacggcggtgaattcgccgaaggacatggtcaccttgttgatggcgaccatggtctgtgcaggctccagctgcggtgcgccattgaactggcgcacggtggcattgagggccatggtttacctccgcttacggttgggcagccggcgccgcagcgttggcacgctcgacgaaggcattggtataggtccgggacagatcgatatcggccttggcgacatccgtgttgaactcacgcagcaccttcagcggtgtttccagatcggcaggcgtgaagtgaccgtcccgggtgaagatcgcgcgcgcgttctccaccgcgcgggcataggtggcgcggtcaccggagacgtagctgtccggcagcgcggccacgatgtcttcagcactgttgtcggcgatgaacttcaaggccatctgctcggcgcgggcgatcttctcggccgcttcgggacgcgtgtccaggaagctctggttggcgtacatcaccgaggtcgggtacaggccgccatagacctggcgggcgccgtcgtcgctgcgcgcgtcgaggatgatcctgccgaccttgcgctcggtgatcagggtggcggcaggatcatagttgacgagcaggtcgatcttgccctgctccagcgcggccaccgctgcggcgcccgagccgacgccgatcaacgagatgctgtcggccggaatatcgtgctgggcgaggaagtgacggacgaagaagtcggacgaggagcccggcgcggtgatcccgaccttctggcccttgatggtctccgggcgcgccggatcgaaggtggcatcctcgcggccggccatcaccaggccggagttgcgcgagagcagtacgaaggccaccacgtccttgcccttggcctgcatctggatggtgtggtcgtagaagccgacggccacgtcggtggaattggccaccagcgcctgcaataccttggagccgccctgggcgaagttctcggtcttcacttgcagcccgacgtccttgaagtaccccttggcgtcggcgatgaagaacggcaggttgttgaggttgtaggagccgacgctgatgcgtaccggggcattgtcgccaccgccggcggatgcgccttcgctgcgcccgctgttgctgcatccggccgcggccagaccggccgcgcacagcgcggccaagaagaactgcttgtacatcatccctcccaggagtgaagcatctacgttgtaatggcgggcatgcgcgtctacgcaggcccgtccgggttcagatcatgccgctgacgtccattggcgggcttgggtggcactggccgtggcgggcgcgggcgaagtcgcgtacacgcgcccctcgaacaagcggcgtgcggtgcggaccacgctggcaatcaccggcgaatcgcccgagctgcgactgaggcccacctccagggccccactcggatgttcgagggtaatgctgccgggaacggaccggcatccgaccaaagtgtgggccagcgtgcccggcgtgacggcggcggtggccaggccgaccgcaccggtgatggccagtgcggtgtggcattggtgcggcatgaaatagcgcacctgcagatcgccgccctgttgcggcgccgacagcagcaccggcttgggaatgaccttgttgccggcgtcggcgatgcccatgcgggcgcccgcttcgatgcgcagcgcttccagccggcgcatgaacgccgcgtccgcgttcagttcggcgggcgaggcatcaccgcgcacgcccaggtcttcggcacgcaccagcatcatcggcatggcgcagtccaccaggctggccggcacgccattgatggtttcctgcgcatgcccgctgggcagcagcttgccggtgcgggcgcctgccgcatcaaggaaggacagcctgaccggcgcggctgagcccggcgcgccggcaatgcgcgtatcaccgcggtaggccacagtgccgcccggcgtttccaccgtggcgatgatcagcttgccggtattgacgttgtggatgcgcacctcggtctgcggatcctgcgcctgcaccagcccacgctcgatggcatacgggccgacggccgccagcatgttgccgcagttgggcgaggtatccaccacctgctgctccacccggacctgggcgaacaggtagtccacgtcagcgtccgcccggctcgagcggtcgatgattgccaccttgctggtcagtgcgttgccaccgccgatgccgtcgatctgcaacggatggcccgagcccatcacttccagcagcaggcgatcccgttcggcggtgtccgccggcaggtcgctggccaggaagaacgggcccttggaggtgccgccgcgcatgagcacgcagggaatgctgagcagatcgttggacatacgtgtgctagattgatgcgtataggggatgaatgatccctctttgattcgatactggcatgaccctaattgatctgtgaatttctgatttttggatgattgatacccaatgagcatcaattgcgaaatcctggatctacgcgcgttcctgctggtatcggagacacgcagcttccatcgcgccgctgaaatcctgcacgtctcccagccggcgctcagccgacggatacagaagctggagcaggccgtgggttcgccgctgctggagcgcaccacgcgcagcgtcagtaccaccgctgtcggcgagaacctgctgccactggtgcgccgcatgctggaggaattcgatggctggctgttctcactgcgcggccgggaggacacccgcggcgccaccgtgaccatcgcgtgcctgccgacggcggcgttctacttcctgcccagcgtgatggcgcgtttccacgaagcacacccgaacgtgcgcttccgcattctggatatcccggccacggagggtctgcaggcagtggaacgtggtgaagtcgagttcggcatcaacttcatgggcgccaacgatccgaatctcgacttcgacgtgctggcccaggaccccttcgtcctcgcctgccggcgcgatcatccgctggcccgcaagcgcaaagtggaatgggctgatctggccgagcaccagctgatcaccgtgcatcgcaccagcggcaaccgcaccctgctggacggcgcgctggcgcgcgagaacctcaagttgagctggcactacgaggtgacgcacctgtcgacgtcactgggcatggtcgaggccggcatcggcgtgtcggtgctaccgaagatggccacgccggacggggatcaccccaccctggtgacgcgcgcgatcggcaacccggtggtgtcgcgcacgatcggcatcgtccgccgacggggtgccctgctctcgcccaccgcagagcgattccttcagatgctgatgagccagtggcgtggggaggcgtgagcaaccgcgcggttcacgcgcttgtgctgtcctggctccaggcgaatgtgctgctgccacccatcaatcgggccgtctgcatcgaccattcctgcagaagctgccgcgcgcctgattcgccacctcgcccgattgcctccagcatcctgtccagtcttccgcggatcgcgctggacaccggcagtgcgagcagattcttcagtgcagcgtctgtggccgggaaatcgcccaggcgaatggtggacaggtacttcacccattggcagtagtcgccctcgaaaccggcctcgtcaacatacatcagaaggtccgcagctgttctcaccccttcgagcattgcgaggtgagcctcgtgcgtgccgcggaaaaagtcctttggatcttccgggcaagcgaccctctggccgagagacatatgcaggtgtggcaggccgtcatagaccggaagtgcgaaggtccatacatagatggaggacggcgctgggtccatggcaaacccggagatcacatcgcgcgtgtacgaaacaatcagaaagttgccaaccacccgcaacccagccttcctggcgttccgtttcattgtccacagatcaatggatctcatgcgtgcgcccgacggttggcgacggcataggactttcaatgttcaactggatgccctgcaccattcgccttccgtcgcgacaagggctcgatccagatcgcgccttgcaatggaaatcgatctcagaccaagcgattgagcgacctcgcactgcgagaagaagatgtcataggtctccatcaactcggcatgaaacagctgattgggggcgttgtcgatcaccctgaagaggtccgtcatgaaattccatgcatccacgacctccccggggtcgacctcccgccctgaatctacagacgagatcagcgagtcgaggtcaatgacggactctccttcccagtccaggactcggccgcgcgcggcaacctgaccctccagcccttccttgctgctatcgcagacaggccttccattgctggacatcacccgatcatggtcacctgatacccaggcaaaccagatgatccgcattccccctgcaacgccgaccggatatatcgcttccactatcgattcctgctcagatggttccatccatcccgggctctcacgggaggtacagccgctccgatggtaacgccaaactcgattgccgatgacctgcggagcctccagcgaccggcactaccaggtcaatcaacctgcggtttccagccccttccccgccgcatccatccgcagcgaggccaggtagcgacagtacttgcccacgaagacgccagtgaacccgccggtcagcagcaggtaggcggcgctgaagccggcactggtggtcagcgtcggcgacaccgcaaatgcgacctcgaagccgtacttcaccaggaaggtgaccagcagcagcggcagcaggctgaagtccgcgctgcgccagagcttgccggtgctgcggtccagcgtcagcttcaatcgactcaacagcagccaggcaagcgcggcccccgtggcgatgccggccagccactcgctccaggcgatcagcgacgcgccgaaacgatggctgatcgaccacgcaccccagacggcaaacaggccgggcacgatcgccagcttctgcagcgaggtctgggccggcttcatggcggcaatgccacgggtgaccaggaaggccaggagcagccagacccagatcggcgtctgcgaggcgagttgctggagcatgttcatgagcggtccccctggtgagtggtggctgagtggtggcgaggtgtcctcgccttggcgctcactattcgcttccgcccgggttgcagccagtgacagctgtcagccatcgcggatgacccgccggcatgctgcgcgtccccggcagctgtcggggtggattcacccggttcaccctgagcgggccggccctcggtccgcgctaccatcaccacgacgccgctgcgagccacgtgcatgtaccacgaccctgttcgacgccgcctgtgtgcggcgctgctggctaccggctgcggcttgtcagcaccatcggcgctggcgagccgggcgacgttggcgggatgcggttcgctgaccgcattgctgcaggccgaacggcagcctggcatggcggccgttctggtcgatcacgggcgcattgccgcgctgtccacgaccgggcggctcaatgacacccggcctgcaccgattgatcgccataccgtgttcgaactggggtcgatcaccaagctgttcacggccctgctgatattccggctccagcagcggcatctgctcgacgtcaccgcgcccatcggccagtacgtggaagggttgccttccgtatgggcatccacttcgctgctgcagctgctgagccatacctcaggcattcccaactatctgaatgaagacaacttcctgcggttgatgccgacgaatccagccccccgtgaattgctcgcagaggtggccgagcggccgctggcgtttgcgcccggtgcgcggcacgcctattccaatacgaactacatcctgctcggcctggccatcgagcatgcaaccggcatggactactggcgggttctgcaggaggagatactgtcgccgctgggcatgcgcgatgcgggaccgcgtcgtgccgacgatcggcgccgtgttgcccaggggcatctgttccaggatggccactggcgcgcaccgccccccactgctccgggctcggcatgggccgccggcggcctgctcgccagcatcgacgacatggcgcgctttgctgtggcgctggaccagcatcgactgttgcccgagtcggccctgaagcggatgtggtgcgacacactcctcgccaatggcagcaaggcgggctgggggggcggctgggaagtttccgatggcggaaaggtagtcggccatggcggcgggaccgcaggctttaccgggtatctccggcaccgtcccaccgatcgaagaacgctcgtcgtgctgatcaatcgcgccggagatatcaacccgcagggcattgcagagcgcctcgacctgggcatgcgtggctgcaatgggaggctttccaggccgacgccttcgctggatcaacccggcacccggacaacgcgatccgtgccatgacgcagatcatcggcgctggctgatggaaatgtggcgccggtactgcgccacccactccagcgacggcgcaataccgccgaacgggaagaaatgcgggctgacctggccatgggcgcgggtcagccccttcaccaggcaatcgacgaacacctccggccctgccgtgccgagcagccggccgatcgagatgccataccgggccagcatcgatgcactggcgcccacgccgcacatcgcggcgtagcgcagcaggcgagagacgctggccgggcccggcacgccgaccagcaccgggacgctgatgccacgcgcgcgcagtgcatccagccaggccagcacggcatcggcatcgaaggcgaactgggtgacgatcaagggggccatgccgcgcgcttcgatgctctggcatttacgctcaagcgcctgccagcgttcgtcactgctcattaccggatgcccttccgggtgtccgccgataccaacgaccttgatcccggagtgctccagaagaccggtctggatgatcgaagcactgtcggcaaacggcccagcgggcgtggccaggtcgcccgcgatcagcaggcaacgcgcgaccccggcgtcgccggccgcgcgctccaggaagcgttcaagtgccacgtgcgacccgatgcgccgggcagagagatgcggcatcggttcgaagccgagcgcgcgcaccgtgcgtgcggcggccaggcgggcgtcgtcatcctcgctggccagccagggaatggagatgaccgtaccgcgcgggatccgatccgcctcggcgcgcagcgcaggcatggccttcgcgctgacttccagtgaaaaggcgttgatgaaggattccgcgtgcgctgaggtaccggccggcatcagcgcgcctcgcgtgcattgccggcaagcggcgagctgttgcgggccagttcgatgaaggcctgcaggtagtcgataccggtatcggcctcgcgcgcacccaggtagatctgcttggggatgcctttggcgcccagccgtacgggcaccacgtccatgcgcgtggcgtactcctccaccagccagcgcggcatggcagcgacgccgcggccgctggccaccatctgcatcatgatgtcggtggtttcgatggccttgtggcgccgcggggtgatgccggccggcagcaggaactggttgtagatgtccaggcgctcgaacggcaccgggtagctgatcagcacttcctggccgagctggcgcggctttacgtggtccaccttggccagggcgtggttgctggccactaccagcacctgctcgtaatcgaacacggggatgaacttcaggcccggcttcagcagtggatcgggcgtgaccagcaggtcgatctcgtaaccgaacaatgcgccgatgccaccgaactggaacttctgcttgacgtccacatccacgtccggccacgccgccaggtagggagagacgatcttcagcagccactggtagcacggatggcattccatgccgatgcgcagcgcgccgcgctcgccctgcgcgaactggcccaaccgctcctcggccaggtccagctgcggcagtacccggttggcgaccgccagcaggtactgcccggcctgggtcaggcgcaggctgcggccctcgcgcagccagacatcggtgcccagctgctgctccagctttttcatgctgtggctgagcgccgactgggtcaggttgagcaccccggcggccgcggtgagcgagccctgctgttcgacctgctgcacgatgctgaggtggatccgttccaacatgacgatgaatctcattcatggattggtgaagtaataccattttacgtcatggaagggcatggctaggatcgggtcatgccttcggttgcctgccagcctgctgacccagccggcctgcagggctgcgcacctgcagatgcccgaaggcgctcccctcccccgctgatagcgaacagatgacccgccccctccgtatcgtcgccgtttccggcggactgcaacgcccctcacgggccgccgccttggccgagcatctgctggacctgatcggcgaggacatccacagcgaacagcagctgatcgaactcggtgagctggcaccgcagctggccggtgcgctgtggcgctcgcagctgcccgaggccgtggagcggcagctggttgcggttgaacaggccgacgtcctggtggtggccacgccggtctaccgcggctcctacaccggcctgttcaagcacttcttcgacttcatcgaccaggatgcgctggtcgacaccccgatcctgctggccgccaccggcggcagcgagcgccacgcccttgtgatcgaccaccagctgcgcccgctcttcagcttcttccaggcccgcaccctgcccctgggcgtctacgccaccgaccgcgatttcgccgagggccgcgtgcacaacgacgcactgatccagcgtgcgcgactggccgtgcagcgggcgatgcccctgctggcgctgtcccatcgcgccgcgcctcccgctaccgcagaggccaccgcaacgctttgaatgccagacgccgccgacctgcatctggatgtcaccccgcaacccggaacgccgccatgacgaccgataccttcaccttcagcatcacgcacatccccttcaacgaggattaccagccggccgagggcacgcgcatcaccaccaacttcgccaacctggcccgtggcgcgtcgcggcgggagaacctgcgcaacacgatcagcatgatcaacaaccgcttcaacgacctggcacattgggacaacccgaatgcggaccgctatgcggtcgagctggacatcatcaccgtggagatgcacatcgacggcgccgacggcagcgatccgttcccgttgatcgaagtgctgcggccgaccatcgtcgatacgcagaccggcgtgcgtagcgagggcatcgttggcaacaacttctcgtcctacgtgcgcgactacgacttcagcgtcgtgctgccggccagcaacgagggcaaggacaccttcggcattccggagggctttggcgacctgcacggcaagctgttccagcacttcctgcgctcggacgcctaccgcgccaacttcagcaaggggccggtgatctgcatcagtgtttccagcagcaggacctaccaccgcaccgagaaccatcacccgatcctgggcgtggaataccgccagggtgagttctcccccaccgaccagtacttcgacaagatgggcctgcaggtgcgctatttcatgccaccgggcagcgtcgcgccgctggcgttctacttccagggcgacctgctgggcgattactcgaacctggaactgatcggcaccatcagcaccatggaagccttccagaagatctaccgcccggagatctacaacgccaattccgtggccggcaaggtctaccagcccagcctgaagcaccaggactactcctccacccgcatcgtctacgaccgcgaagagcgcagccagctggcggtcaagcagggcaggttcaccgaagagcacttcatcaagccgtaccgcgccgtgcttgagcagtgggccgcccgctgatccatcgatttaccaaccgccccaggacacacgacacaatgccgacgaagacgctgctccccacctccaccgcaggcagcctgcccaaaccctcctggctggcagagcccgaaacactctggtcaccctggaagctgcaggacgaagcgctgcttgaaggcaagcaggacgcccttcgcctgtccctgcaggaacagcagcacgccggcattgatatcgtcagcgacggcgagcagacccggcagcatttcgtcaccaccttcatcgagcatctcagcggcgtcgacttcgagaagcgcgaaaccgtgcgcatccgcaaccgctacgacgccagcgtgccgaccgtggttggcgcggtgagccgcccgaagccggtgttcgtggaggatgcgaagttcctgcgccgccagaccacgcagccgatcaagtgggcgctgccgggcccgatgacgatgatcgacacgctgtacgacgcgcactacaggagccgcgaaaagctggcctgggagttcgcgaagatcctcaatgaggaagcgaaggaactggaggccgccggcgttgacatcatccagttcgatgagccggccttcaatgtgttcttcgacgaggtgaacgactggggcgtggccgccctggagcgtgcgatcgaagggctgaagtgcgagacggcggtgcacatctgctacggctacggcatcaaggccaacaccgactggaagcagacgctgggttcggaatggcgccagtacgaggagtcgttcccgaagctgcagacctccagcctcgacatcatctcgctggaatgccacaactcccatgtgccgatcgacctgatcgagctggtgcgcggcaagaaggtgatggtcggtgccatcgacgtggcctccaccacggtggaaaccccggaggacgtggccaacaccctgcgcagggcgctgcagttcgtggacgccgacaagctctacccgagcaccaactgtggcatggcgccactggcgcgcgacgtggccaggggcaagctgcgcgcactcagcgcgggagcgaggatcgttcgcgaagaactctcggcataaccctggctggggaggaattgtcgttcgaatgtcggtttgacggagcctggccgggtatcgaccaggctccaccccgcccctgcacttccggtcgggtcttcatcgcgggctgtcgcggcgccagtgcctgcttgatccgtaccacctccctcgccccggcctcggccaggcggcgggcctgctgccgttgttcccgcgaaagcgcgggcgacggcgcagcgcctgcttccggcgctacgtccaccaggcgtgccactgcctcgcgcagccgcagctgtgggcagagccgcgcagcacaccagcgctcggcgtagcgcctggcctgccgcacattcgtggcggccaccaccttggtctgggacatcctgcgtgcatccaggtagacccggaagccaagttcggcatgcggcacgatgttggccaccgagcgcccgttccaccacaggtcccagcgctcgccgctccgtacccagccggagggccgggtgaccgtcatgaactctggaagatcgaagggaggactcatgccgggaaggatacgagcgcccgtcgcaccggctgagatccgcaccgtgcgcttgttcgagaccatgaatcgttaaggcgcgcttgcttgcgctacgcctgctccgcaccgtcgggctacgggaacaagaactaaagtgacgcgtcacgctcgatgatgctttcgatccagtcgatgtagcgggacacgcgcacgttgtagaccacctgcccatagaaacccgcttccagcgcatgctcgggtacggcggtgatccaggaaccgaggcccaccagctgccaggccccatctttctcgatcaccagcgggccgccgctgtcgccgttgccgagcacgccttcaaggggaaggccctgcggaggcggatcaaaccggtaccagagatagcgcgtgttgccgccggtgatcgcgttgcaggcccgccgcagcgttgtacgatgcggcccgccgggcaccaggccagtcgcaccattgccggtggcgcctctccctatcagggcggcgacctgcgtgacctcgtcggcgccccggtagagtgcgaccggcggcacatcgcccaccggtgcggcaagcctgatcaatgcaatgtcatccgatgctgccaggaacgcgtggatgttcgacgcgctcccggttgccatcgcttccttgcccagcgcctcgggcatcttccggtagccggggtgcaggaagacacgctcgacgccgtagccgttcccattgatggtgatggtggcgcccctcccttccatcggcgcggcatgcgcggcggtcagcacccagcgcggcgcgatcaggacgccgtgcccctcgcccggcatgtcggccagcgcggggaaggccgatgcatcgatctgataccgggcgtcgtccacatcatcacggatgaccacggcaccggcagtgaacgggagcgtggccaatgccaggaaaatccagcggttcatggttgcttgcatcccagcagttcaatcccaacagcctagggcatggccctgccatacggggagatcgtgcgaccgacccccggcgatggccgacgaatgcggggaaacgggagttgaagccaggtgggccatgccctacctgcggccgcgatagggttcgcagcccacgccatcattgtcacgatcgaggtgcgggccatagcccggatcatcaccacgccgtaccggcgccgccccggcggcgcgggcctccgcgcagttggcaaacacccgggaactgcgcgcgggcgcgggggcgaaactgctgcgcggagtgtcgacgtatcgaggtgccgctggagcgcctcgatgacagtgatactcacccgttttccggttggtgtggcacccctgcttgtcgagcccgcccggatgcgcgagcgcattggcggacagtgccagtgcgagcatgccggatgcagtcaatacgctggaaacgcggcgtcgtgtgtccatgccttgcccctgtcaggcactcctgccaaggggaaggctagcatggtgtctcgaccgccaggcttgacgctgcagcggctgccactcaacgcaggtagtccttcaggaacagccaggtgatcagcgtcggcaagatcaacaagaagaagctgcgcgtgctgcacgacccggaggcaggcgccggcagtcgctgatccctgagcggccacgggctctgcgccaatgcggggaaatcaatgcacccgcgctcctgttccgtcggttccgccgcatacatcgtggctggcgccgatcctccctcgcccctcgctcctacagtggattcgcggcgacgcacggcctgcacccccgatggcaacgtcgccgcccccacctttcgagcccacaggagcgagacatggcatgcctttcccggactatcgatggcacagcggcaatgcgcccagccccctccacgcaggttgaacggaggggtgcaccatgaaccaggtctacgtcgcagtctgggatggagcccactatctggtcgtccgcaaacgggtgctcaacagctggtggggcagcaattccgttgtcgtactttctgccgaggcgatggccgctgtgctggccatccgcaacgcgtccggcggtggcacagagcaggactgggatctggtgaagaagctgctttccggcgcctggcgcgccgcagggtcagtcgcctaccgcggcgaacgcacgctgccccgcaccatggacgcactggaccgggcgcttgaaagcgccgaacgcacgcatccgcaaaccgatgacatcgccatggagacgctggccgctctgcagagcctgttccgcgaggacgcaagaacccccccccgttcagcgctgcgcgagcaaccttgcgggagctctccatcgcgttgccgccgcccacccggggtgcgccgaactgggccgctgcgttgatactggcacaacgcctggtggcggaagtcggagcgtggtcggatggcctgcccccggcgctggtgaaccaggcggggcaatgggccctgcccggcggcggccgcctgaacaacgaacgcaaagagcgcgccgcgcgccgcgagttcgaggaggagcttggcatctggcttgggcagggacgcgccgcatgcgatctgcgtgcccggctgtttccggatgggggaggcagcttctccctggttcgcttccgcaccacggccgaggagctcctgcggatggcgcaggaggccgagaacaacgtccaggccagtgccagcagccctgcgcgcccccagtcctgcctggtgaccgactgggaggtggcgagcatcggacgggtgccggtggccaatctgcgcaatgtcctcggggcacgtgtggaggttccgggcgaaggaacactggaggttgacgaggccctggccagcgccaggcccggtagccaggagatcgactggtaccgggagatcgccgccctgctgtcacccgcctgagcctccagcgcgaacccgtgtgatcccctgcaaccccagcgaggcccctccatgaaagagagcacgcccgagcgcgaggcccggcgccacatcagcaagcagctcaccgcgcagatcaacaacgcgcaggcgtatcccgacgtccgctcggtcgtggtcaaggccctgtcggacatcaaggaccagctgcgcagcctgtccagcaaggtacggcgcgactacagcctgaagcctgacgagccgctgatgttcttctacgtcaagggcggcaacgcactggacgcactgcttgaacgcccggcccagccgccaccgacgctgttcgatttcggccggtccgactgggatacgcaggtggtgatcaatccctggattccgatcccggcccaggacgccctgcacggcggcgtggaggacatcgtgatcgaggtgatgctcggcgccggcctcaacatcgcattggagatcagtgtcttcccacccaaccagaatccgctggccggccaagtggtggatcttgcaccggtggacatccatgtgccgcccggccagcagtgcctggtgacctgtgacactccgcaggcgttccggaaggtctaccagcgtgaccgcgcgggcctgcatctgttcaccagcgaaccgctgaagggcatcggcacctccacggccttggccagcccgtccgtgctgccaccgccgcagccgccactgcccgtgcagccgccacctacccctccgccgccacccggcatcatcctcaacgacggcatcaagccgttcgtgctgtaccgcatgggctacacctggcacgcgcgatgggtgaaggatccgaaggcgcctgtcggcgacgacccggtgacgccgcggccgatcctgatggaactgatcgatgtgaccacgccgcgccgcgataccgtggaggccgtgacagtgtggtcggacatcatccgcaaccatctggtgattgccgaggatgccggcgcggaagagcgctggcggctgcccctgcccagcatggagtaccacctgtgggaaggcctgaccatgctgtgcgagatcgccgcctatccgggctggccgggtgcggacaagctggagaagcgtcgccgcaatgtgcagcgcatccacgactggtaccgcgaccagcagggcgacctggcgacgttcggcagggtgatcgatggcatctcggcggcgccggtgttcgccgatgacagggactgcatgcagcaggtcgatgcctgcatgcgtgaggtcaaaatgcgcatgcaggcgtcatcttcgggattcgatcacggcgccctgtcggccacccacacgcatcgcctgcggcaggggcggcagtgggtcgcgcagcgggtcgcaacgctgctgcaacgcctgcagacatctgccgcatcctgtggctacagcgacgatctggcgttgatcgggacgctggcacagaacccctacctggatgtcacccaggtgccgatctccggcgtcgactgcgcgatgatcatccgcaccgatcctgcaacgctgcgcagggcgacggcggccaactgcttgaatgcgcttgccgaggatctcggcgcgcacatgaccatcgaggattccctgcactcgaccgtacgtgcgacgggtatcagttacgagcgaacgctggtgatcttcgatgcgccgcgttcgccgtcggcgcgcgtggccaaggcgatcctgacattcaccacggctggcccggtcggttgcccgttccgggacagccccgacggttccgggcaggccatcgcaccgttgctggacatggacaaccagcgcaaggtggcagcctcgatcgtccagggtttcgtgcaacgggcgaatctgtccaggcagcacgagatgatccgggtgctgttgccacagggggaatgatcctccatcagcgcagcgcgggcggcgggttccgatcaggtccgatcagtccctgccctccaggatccatgcctccagcgcctgcgtgtcccgcatgtcccccgcgtagcggcgatccggcacgtagggctcgttcgaaccgcgcccgcgaccgcggtagaccttcatgggcaccgaaatccggctcagcccaatgggcaatggctgaggcctgatatccatgtagacactgtcggcggacgtctcgacccccacctgcagagcgcccagccgcttccatagatccagtgcatccaggcaggctgagccgcaggaggcgtccgccacgatcaccaccctgccgctgcgatccggaacggctgcagcgggcggacgcatcggcccaaccggcgcgtccgccggttcgcgccacagcgcctcaccgttcgcaccggcacgggccatccctgcggtgaccgtttccagcatgtgcagcagttcgggcgacgcgtcgtgtgctgccttcagcttctgcaggaagccgcgcagctgcgcgatgttggcctccgatgtccgccattccgcccaactctcgtcacgcaatgcatccaccgctgcaggcccccagatcaaacgggccagcgcgatgctccagtgcgacgcacctccggtattgccgcgcacgtccagcaccacccgcggtgcctgctgcagtgcgtcggccaccggggtgagttgctgcaaaagctcggtcagctgctgggcattgcgcgtggctggatcggcattgaagctgctggtggtgatccagtagccgccaccggccaatgtgtgccagccattggctgggcggaagctgcgacgggtatcggccagtcgcgcttcgcgtgttgccgtatcaatcggaagccattgcagcgtgtaggcgctctggcgcccatccacccggaagacgcagcggtgcaacgtcggcacgaacgggttgccctgttcaagcagcacctcgccgccagcgtggatacggctcgcctgcaggttccagcgcccgttgaagtcgcccacgcgccactcagccagtgcctgtgcatcgacgccatcacaggacagcaatcgcgcgcccatgggcggccgaccggggcgtccatccacgaccatcaccacctgcgcgtcaccttcgaagcccgtcaggaacccgggccatcgggccggcagcatgggggcgcccgccaatggattgagactcacgtggccatcgttgaacgtggccgcatagcccttcatcgcccaccagtagccggcgaaactgtcgacctggcgcgcgcgcgaccgtgcaagtgacagggcgccgtccatctgggagacgaagccgggattgtgcgggtcaaccaccccgggatggctgccgcgcagggccgcgtcagcagcctccagatccatcaacagcgtgctcggccaatctgtggcacagccttgggtgcctgctgccagtaccgcgccgaccagcaacgatgcgagcgccatcgattcacctctcgactggattgcgctccagtctggcaactttcaggtctgtcgtgccgcgcccgccgcaacgggcgcggcgccacgtcaatgcaggggcaccttcagcaccgaaggcgcgttggccggtgagctgaaggtcaccgcaccgcccagctggctgatgcctgcatagcgcaggtccacggtatcgaccaccagggtcaggcggctgccggccgggaggttccagctgctggcttccaggcggagatcgattgttttcggctggccgggcgcggccccgcgcagggtgtagggcttgtggctgaccagctggccgttgcccagcgcgtcttcggcatacaggtaggcatacagcgtggtattggcgcggctgggcgtcaccgtcacccgcacttccggtgcgccatccaggcgacgtgcgctccagtagatcgggccctgccagacgccggcggcgttgcggccgacgaacggtacataggcgccgggcggcaggttgatcatctgcagtgcaccggaggccatcaccacgccggaattggcagccgtcagcagcccgctgccgatgcggtagctccagccggtagcgccaccgttctgcgccaggccgccggtgggaagcaacaaaccggagggtgcggtcaggccgtagctgacggcgcccgcattggtggcctgccagtccggatagcggctccagctgcccttctgcgacttcagctgcaccgctgcctggcgatcgatgccattgtccacgcccttcaggtagtggtcgaaccagtcgcccacggcggcatagacctcattgggaatgccgaacgcaccgaaggcctcgttgagggcatggtcgccgtggcgcaactgcagctgcttgggccccttcaggcggttgaagaaatcgaccagctggcccggcgggaacaggctgtcattgaaggcattggcgaggaataccgccggctggttggcgttgatctcttcaaggctgctggccgggctgcgctgtgcggccaccggcagcagcgagtccaccgccccctggtaattgccgaccagcacattgcggttgatggtggccagctccgcgccggggcggccggtggccaggcccgccgccaccagcagggcgatgccctgggcgctgggtgtgtcatggctgtacagcgacgcctgcaggtcggcccagccactgagtgcggcaacggccttgatgcgggggtcgcgcgccgccgccagcaggctggtgccggcgccataggagatgcccgagaccccgatcctggccggatcggcacgggtgttgtccagcgcccagtcgatcagcgcgctgacatcctcgaccgtggcgggcccggcgatgtcgatgctgccacccgactcccagaagccgcgcgagctgtagctgatgaccacatagccgcgctgcgccagcgactgtgccacgcccacgtactcaacgctgggcaccgcccagctgctgggcatgaccagcagcggatagcgcccgctgccggcatcctgcggctcgatgacgaaggccccgagaggcgtgccatcccaagtgggaatggtgcgatgggtggtcttgaccgtggcggcccaggcggtaggcgccaggccggtcagcaggatcaacagcagcaaaagcttgcgcatcgtcgtctctccccgtcggtggtggtgcaacgggtcggaccgtaccagtgcgaatggtggctggcaccttgcgacgcagcatggcgcaaagcgcaccttggtatgcttcgcggcactgcggtcctccgcaggctcccatcaatgcaaggatgccccccgatgcgcaggacgctcttcgtcggcacgctcttgagcgtggccagtctgttcgccccttcagccgtggcggcccgggaccccgacgtcacggatgactgcagcgaaatcgcgcagttgatgtccaacgacgactttccggcactggacgcgatggccgcgcgcctccgcacgggcgagctcaacgccgccggcgaatcccggctgggccgtttctacctctgcatgtcgcgtgcaatcggcacggcgcggcaggaggtggaggcctggaaccgctggtcggcctgggcggcgcgctgggttcagcatgcgccaaagtcgccggcagcccacctgataactgcacggattccgctcaacctggcctggagctaccgcggaaatggttacgccaacaccgtcaatgccgaagactgggctcagttccatgagtacaacgcggcttcgcaggcctacctgcaatcgcatgagggcgttgccggcggcgacccgttctggcacgagatgagcgtgctgatcgcgctgcgcgagggcgcggatgacgaagaactactgacgctcgtcgaccgtgcagcgaaggccttccccgactacgagccgctgcacttcattgccctgcagcacttcacgccggcctggggcggcagcgcacagaagatggaagccttcgcacggcgctcgatggccagtatcccgaagaaaaagcgggccatgcgctacgcacggctgtactggtcagccaccgcgtattcggccgatcacttccgcgcggcgacacccgattggccgctgatgcgccaggggctggacgaaatcgcacagcgctacccgaccatcgacaatctggagaccattacacgctacgcctgttgggcgcgtgacggcgatgccctggatcggtggaatcgcctgtacttgagccgaagtggtttcagcgaggcggtcattgcggactcgagcgagcaaagcagggccgcctgcctggcgccggatgctgggcaagaggcttccttgtagagccaatcggtgcggaaccgggccgcggaggatgcgcggtccagcatgcacttcacacctgcagggtgcttagcacgtacgcatgtcagccacggaccgcgtgatctgacacatcaccagtgcttgcacccggtcacagcttcgcgttctcgtcgttgaccaaaagacgacagcttgtgacgcttgcgacaccgcgcggccttccgggccctcctcatcgcggcctcgctctactgcactccgcatcacccgtatccgcaacgccttcacatgacacaggccgggcctggtcgtggcgggcagctgcgtcctgaactctttgctggagaatcgcaatgcgccttgcaagcttcgtctttgccttcgtcctcagcgcctttgccggcgcagcccaggcccaggtagtcaccctcaacaagggcggcttcgtgctcacctacgactgcagcatccacagtgccacccgctacgagtacacgctcaccgccgataccggttcggccgcacggccgtccagcttctacaaggacccggacctgccggccggttgcctgggccagaccagcaccgcgtcctacgccagcatcaaatccggctatgaccgtggccatctggtcacgtccaaccacatggattacgacgcgacctacatccgtcgcgccaactacatgaccaacatcgtgccgcaggtgtccagcttcaaccagggcatctgggtgaaggccgagaacgtggccgagtgctaccgcgacatcgcgccggtggacgtctacggtggcgtggtctacggcgatgccgccaacgattatttcctggccagccatggcattccgacgccggagttcttctggaagacgatcatcacccgcgacccgaacaccggaaccgccaaggcgatcagctggatcatccccaacgaggccaacctgggcagcctggacaactacctggtgacgattgcggatctggaggaactgctgggcgccagctacgtggcgatcaacgcgccggcctcgctgaaaaacatgctgccggccaccacctggccgcagccggccgggtgtgacctgggctgatcggggggcagaggaacgtcacgatgcctgtgcgcgcagccatcgtgacgccagcactctggccagcaggaactgcactgcggcgccgacgacggtggcaacgacaagcccgcgacctgtcgtcggcgccccagcggacagcgctcgcagaagataagccatgctggccaggatgatcagcagcgccgtggcaagcaggatcagcgacaccaccatcgtgcgcgccgtcgatgcgggttccggcgacggcgcgccggcccacaggccggcaaacgtggccagcgcgcaggccaccagcaggatcaggctcgcaatctgcagctgcgcggcgccgtcggcaacgggcatgatgaactcgccgggcgagaatcccaccggcagctgcgccaccaggatggggagcaggcagctgccggccaccagcgccactgcgccggcgatgctggcactgatgaggtgatggtgcccgccctcggcagggatgcgccgctgcatcagcagcgccggcaccaaggccagcagcgtgaggaccagtgcatgcgcaagcagcatcagactgatggctgcgacgctgtagacgggaaactgcgcctgcgccagtggaatgcgcatggcgcgatcaagcacgatcagcaacccgaaaaaggcgaccgaagcgatcaccggatgccggatccgcagcgcgccgcgacgcccgaacagcagcatcgacaccagtaccgccgctccggcgaagagactcagcctgaaaccgagctccgccagcgcgtagccgatttcacctgaggcctcgggcgggcccagacggcgcccgaattcgaccaggcggagggctacgggcagatacaggcagagcacgtaaagcttggcggccatcgcgaaatggatggggtacgcactgaagaatgatcgcaatcggttcaaggcgtattcccgtgcaggcgctgggcgggctgacctggcagtctagcgttcctgtggcccgcgtgccccgcccgacccgctatgggaaaatggcgggcacgtcgcccctttggctgttcccggagtagtagatgtcccgtttccccttcgatgccgtgctgttcgactgcgacggcgtactggtcgattccgagccgctggtggcccgtgtgctctcggaaatgctgaccgcacgcggctggccgctgaccccggcgcaggcgggcgaggtcttcctcggccagtccgtggctcatctggccgggctgatcgcagagcgcaccggcaagccgttcaccgagcaatggctggaggaattccgccagcagcgcaaccgtgcgctggagcaggacctagaggcgatccagggggcgcccgaggccgtgcgtgcgattgccgcggccaccggcgggcggattgcctgcgcctccggtgccgacctgttcaaggtgaagctgcagctgggcaaggtcggcatccttgatgccttcggtgcccatgtgttcagtggccaggacatgccgaacaccaagcctcacccggatgtctatctggccgccgccgcagcgctgggcgtggacccgaagcgctgcgcggtgatcgaagacaccgtgaccggcgccaccgccggcgtcgcggcaggtgcgaccgtgtttggtttcagcgagggcggcccgcaccacagcacgccggaggccctgcgcgctgcgggcgcgaaggtgatcttccagcgcatggagcagctgccggcagtgctggcggcctacgccgccgacgcagccgcctgaggcggcctcagcccgcagcgcccagtgcggcgccgcggcgttccccggcgtaatgcagcacgaacaggtacaggccggtgaacagctgcaggaacagtggcggcagcggcgaataggtgatccacgctgcaggctcgccctgccccagcccgcggacgacgaagttggcgatcaccgccagggtgaagacgatcgaggtccagcgatgtacgggccgcgcccagccaccgcggctcattgacggcgcctcgcttcggagcgcgcttcgatcatcttccagccattgccggacgggtcgcggaaccccgcatcgatggcgccgtagcgttcgaccggcgcctgggtgaactccacgccctgcgccagccattgcgtgtagcgcgcctggcagtcatccacggccagcaccagcggcggcattgcgcccttggccaccagctgctgcagcgcctgcgcggtggccccatcgtgggtgggcggaccgggcacgaacaggcccagctggaatccgtcctggccggggctgcgcaccgtcagccagcggtagctgccattgcgcacgtcggtatgcacttcgaagccgagcgtgccgacgtagaacgcgagcgcctcatcctggtcgcgcacatacaggccgaccgtgttcacagtgtttgtcatgggacctccctcaggtgggatccacgttagcaaccgcctcgcggcggcgcttctccaaaactgcgatgttcaggtccggtcgctgcgcggcacgtgcgtggcattccggcacgctggccggcgtcgcctcgccggcgcgctcgcgctggcgcacattgcccgggctgtcgccggtgatgtcacgaaagatgcgcccgaaggtacccaggctgctccagccggtctgcgcggcgatctcggtgaccggcagctcggtgtcacgcagcatcgccacggcccgttcgatgcggcggctgagcaggtagcggtgcggcggcaggccgaatgcctgcttgaacgaacgcgcgaaatgcgcaggcgataccgcactgacctcggccaggcgggccaccggccagtcctcgtgactggcgtggtccatccggtccttggcacgcagcaggcgccgcaacagttccgggctctggttcatggcgtcaccgcgtgtgccagatgatgtcgcgacgcacgcctggcctgcgcggcctgctcgcccagccagtcaccgaatgcgatgaccttggtgctgcggctgcgcgccgtcggtgccacgaaccagaaaccacgcccgtcgctggccacaccgggatgtgcctgcaccaggcgcccactgtccagttcggcctggaacaggatcggcgagccgatggcgatgccctgcccggcaatggcagcaccgacatccagatgctccatcgcaaagggggtgacgaagctctccgggtccggtggcggaacagcaccatgtgcggaaaaccacagtgcccaccagtcaggcctgccgagcagtggaacctccaacgcccgccgaccgagcccgtctgccgccggcagcagcgctggcgcgcacagcggagtgaaaatgctggggaacaggggcgtggcctgcagcccgggccacgcaccatgcccgttgcggatggcggcatcgaaacgcccggcggccaggtcctgcggctctgccgacaggtccagttccagcacgatgcttggatggcgcgcgcggaaactgcccaggcgcggcgtcaaccagctggtgcccagcgtcggtagaacggacaggcgcagtcgtgccgcatccatgtcagcggcgcgcatgaaactggcgcgcagcgcgtcgaaggcccgggtggcctccactgcgacgctcgcaccggcggctgtcaattccacatgctgggcgtgacgcaggaacaggcaggtaccggtctgggcctccagccggcgcacgtggtaactcaccgatgccgcactggtgtcgagctcctcggcggcgcgggcgaaactgcccagccgtgccgccgcctcgaaggcgcggatggcgacaagcgatggcagctggcgttgggtcaccataagtgtggcttagcctgagccccgatatccacgtggtcaatccccctcgcacgcgcaacgatggaggcacctccggcacgggataacgcacatggatcgacggcagttcctggccaccctggccgccacggcagcgtccaccgccctgccctccgggtgggccctggccagccccagcgcagactggaaatggttgcagggcaactggcaggtccggcaccaacgcctgaaggagcgcctggtgggcgatacccgctgggacgccttcaccggcgccagcgcggtctggctcaccctgggcgggctcggcaccatcgatgacaacgtcatggcaccgccttcgggcccctacaggggcctgggcgtgcgtgccttcgatccggtgtcttccacctggtcgatctggtggatcgatgggcgcacccctgcccatatcgaagcgcccgtgcgcggcgccttcgcaggcgatggcggcagcttccgtggtcgcgatgacttcaagggacgccccatcgaggtctggttccgctggcatgacatccacggcgatgagccgtggtgggagcaggcgttctccgacgatgccggtgcccattgggaagtgaactggcgcaactggttccgccgcactgctgcgatccccactccgcttgcgaagctgccggatgcaccgggcgattttgatttcctggtgggccattggaacgtgcgccatcgccgcctgcgcgctcggctggcaggcagcgatgcgtgggacgcgttcaacggcaccctgcacaactggccggtactgggcggattcggcaacgtgggcgacaacctgatggacgtgcctggagcaccgctgcgcggcatgggcatccgcgcctggaatgcggccgagcggcactggctcagctggtggctggatggccgcgcgccgacccggatcggcgcgccactgcgcggggggttcgaggccggtgtcggccgcttcttcggcgaggaccagcacgagggacgggcgatccagacgcgggtgatctggtcacgcatcaccccgcgttcggcgcgctgggaacaggcggcctccgccgatggtggacgcagttgggaaaccaactgggtcagcgacttcgagcgacaggcatgaaggcgctgctggccgtgatgctgctggcatcggcattgcccgtgccctccccgcccgtggtgctgcggatcatcggccccgccgagcgcttcgcccccggcattgcctccacacagcatgacgagatccggctgaccctgagtccggacggcaataccgccctgtggttcagccgcaaccggccgggggggcctgggggctacgacatctggatctcgcaccgcgaaggtgaccgctggcggccggccacgccagtgccgttcaacacgccggggcgcgacttcgatcccgcattttccgcagatgggcgcgtcgtgtatttctgctcggaccgcgcaggcggccagggcggtgacgatctgtatcgggtcagcatggggagcgacggtcgattcggggagccagtcaatcttggccccgcagtgaacagcgcggccgatgagttcgcgccgatgctctcgcccgacggtcgtacgctgttgttctccagcgatcgtgcgggcagtgctggcggccatgacctctacagcgcggcgatgatcggcggcgtcgcgcagccggcacggccgctggtgggagacctcaataccgcagcgcaggagttcgatgccaccttcctgggcgacggccgaacggtggtatttgcccgcgcccaggacttcggcagtgcaccggtgcgccagttcattgcctacgaacgtggaggccgctatgacgcaggccatgctttgccatcgcccgtgaacgcgcccagcggcgacagctacggcgcgatgctggatggctcacgccgcgacacgctgacctactcggcgcgacgcgccggtggtgagggactggacctgtaccgcgtccgctaccggatgatgccgccctgaaggcagtgggtgtcgatttcccacgcgcccgttcgtcgagaggttgagtaccccaggagaaaatgcagatgccttcccaacagtcccttgcctgcgcctgcggccaggtccgcctgaccaccaccggcagccccatcgccagcgtcgaatgctgctgcgacagctgccgcagggccggcgtccggatgcaggcgatgcccggcgtaccgcaggtgctggggcctcagggccagacgcatttcgtaatgcagcgcaaggatcgcgtccgcatcgatgccgggcattcccggctgcacgcgtggcggttgtccagcacggccggcagccgccgcgtcgtggcgggctgctgcaatacgccgctcttcctggagttcagcggtggccattggctgagcctgtatgggctgttgtggccggacgcgatacgccccgccgtggagatgcggacgatggtcaacgatcttcccgacgcgtctgtccttcccggcgatgtgcccaacctgaagacccactcgctgcggttccatgcccggctgttgaaggcgtggatctccatgggcttccgcagcccacgcatcgagatcacgggagacagccatgcctgagcccgagcggatcgagatcgagagcatcaccacgcccgggcacatccagcgcgtggatcgcgccaagtacatggccatgcgcgcggccctgctgcgtgccttgcccaggcaacctcccgggatgacggtggcgcaggcgaagcaggcgctgttgccgcacctgcccgcatcgctgtttccgcaaggcgccacggccggttggtggctgaaagccgtgcagctggacctggaggccaagggcgtgatcgagcgtcttccaggcacgccattgcgcctgttcaagcacgtgccggccggctgatcagcgctgcgccggcagctccagccgatgcttgcggcacagccgatacacggtcacccgcgagatctgcatctgccgcgcgcactcggagacgttgtagccggtctgccgcagcgtctgcagcagcacatcacgttcggcctggccgcgggcatcgtgcagcatcgcccccggcggcgcatgcacgggccctcccagttcgaggtcacgctcgctgatcagctcgccttcggccatgatcgccgcccgctgcacccggttcagtagttcgcgcacgttgccgggccattcgaaacgccgcatcgcctgcagcgcagcgggtgcaaagccacgtgcacgcacgctgtggcgcaggcggaagcagcgcaggaaatgctcggccagcagctgcacatcagcgccgcgctcgcgcaatggcggcatcagcaggcgcagcacgttgaggcgatagtagagatcgctgcggaaccgcccctgcgccaccgcgtgctccagttccacatgggtggcagccagtacacgcacgtccgcccgcagcggctggctgctgccgacccgctcgaacgtaccttcctgcagcacgcgcaacaggctggtctgcgcctcggccggcaggtcgcccacctcgtcaaggaacacggtgccgccggatgcggcttcgaatacgccgatctggcgcttgtcagcaccggtgaacgagccacgctcgtggccgaacagctccgactgcaccaggttcgcagggatggcaccgcagttgaccgcgatgaacggcttgcctgcacggccggacaacgcgtgcagtgcatgtgccgccaactccttgccggtgccggtctcgccggtgaccagcaccggcagatcgaccggcgcgaacttgtgcagtacggtgcgcaccgcatgcagcgcaggactctcgccgatcaatgcgcgcggcccctgcccgccgcacacttcgtcggcagacgtatcctccgcgtcgaactgctggcgcatcgccgccaccaggtcctgcaggccgaaaggaagcgtgaaccgcgagatgcaacgctgcaacaagggccgccacgctgcaggcgtgggccctgcgccaggcggcagcaccgccagccaggtcagatgcgcgtgctgttcgatccacggcgccagcaattgctgggccggcgcatccagatggcgaagatccagcacggcgagcagccggtcgcgcccgcgcaggccgatggccatcgccgggtcgggatggatgcgacgcacgtaccagcctgcggccgccagcgcgctgcgctcgttcgccagcggctcgccgaaccagagcacgcatcgtgacgcagaagcctccgggaccgctgccatgcttcccccagcatccggacaccgtcggcggactgtcaggcaatcaccggcgtgccgcccctccgccgggacctctacggccaccgcggcggcctttgttgcgcggatcctagcgctgcgctaaacggcggcgcaatgagcggcgcgtcaagaaagcactggctgaagcggcatcgttacagtccgcggcggcacctgtaacaccggtgcgacagtcggccgcctgccttgccctgcggcgcttggcgctgcgcaatcccaacattttttccacacggctgtatcagtgcagcagcaacgccccacgcccgccagtgcccgcccccctggctgccaagcctttcagggttggcacggatgatgcgtggttccgccgcacccatcacgggagatcggcatggacggcatcacccccattcgcggcctgctggcaatgctggccgtggccctgctgtcggcagccgcgggcgcctctgcctccggtgcccgccagggcgtgaaggcacaaccgggcgaaatcgtcctgttgcgggatgtggccgcgcgaccggcctatcgcatggcgcccccgggcatggcgctgatcgccgatccgaaaccgcagcgcgagattgcgttggcgctcggtgcgggtaccccggcaaacgcgatggatgagctgagcgatgaggactatgccggcatgggggcggggcacacggctgcgaccgcgacccccacgggcaccaccgtcgaacgggtcgcccagcaggccctgggcggcacgctgggacgcagcagtgacggcatgctcggcagcagcctccgtggcgcactgggtggcccactgggcgcggtcgggaacagcacccgcggcatcggcgataccgtgcgcggcgcgctcgcccagttcccgttgcagggcccggccccggcaggtggcaagtgaagcgggcacgttggctgctggtcctgtttgccacgccgttgatggcgcaggccgacgactacagcggcatgctcgcctacctcgacgtggcccgcatcgacggtcacgccctggcgggtgcaaacggcgccatcgcgttgaaccaggcggccggtgacctcaacctgcaggccaacctgcatggcatcgccaccggcgaacgcgccgacgtgtcgatcggcaaccggcaactgcgggccggcaaccgcgtgctgagcgcaccggcgcacgccaccgccgtcatcgacggcaacgcgctggccggtgccagcggcatcgcatccatcaaccaggccagcggcatcgccaacacgacgctcaacgtcgtcagcgcgacgctggccagacagggcatacgcgaatccgacgatacggccttggccgccgaaggttccgcgttggcaggggggcgggacgacgccggtcgcggcgtcgcgaccggcacccgcagcgccggtgtcaccagcaccgcgctgcggggattcgacggggtcctgcaactcaatcagatcgcgggcagcggcaacgacacggccaatgtgctgggcctggtcgtgcaggaccgcccgtgacaaccacccaaccgatgcaccacccgatgagagagagggcaccatgaaagcgaccgtcaaacggaccatgctcgccatggcgattgccactgcctcgaccgccgctgcggccaatggctgggacaaccagaacgccaacgcgaacatcaaccacaaccacaccgtcagcgaaacccgcaacgacacccacaaccacaccgacaacggcgtacgcaaccgcaccgtcaacgtcaatgtgcagaagcacagcaccatccaggccgacgagcgcaaggaaaagaacaaccacggcgtcgacgtgaacctggagaaggacctgcgcctcagcaccgacgtcaatttctccggcgaccccaccataaccggcgacatcgacctcgactcggcggccattgcggtgatcgacaaccgccagtcgatcagcagcaacgccaccagcaacagcctggtcaccaacagtgcctccatcggtgacagcgtgggtgccggcgcctccggcaacctcggcttcaacgtggtatcgggggacaacaacgcccaggacaatgccgcgtcattgtccgctgccgatgcgtccttcagcttcggcatggccgacgccgaggtgttcgtcaaccaggccggcttcggcaacgccaccatgaactccggcgtcaccaatgccgcaggtctcggtggcaatgccttcggcggtgcgtcaggcaacatcggtgtcaacattgcttcgggcaacaacaacgagcagaagaacgcgctcgcggcctcggtcgcaaccacggcgatggcgcagtcgagcatcagctccaaccaggtctccaccggcaacacggtcagcaatgccggcttcgtgcagtcctacaccgataccgtgcaggtcggcctgcatggcggcgtcagcggcctgacgtggggctatggcgccggcacctaccgcggcaccggcaatgcctaccagatggccaactattacctggatacgtggaacggcgcattgccgcacccgggtggcaacagtaccggccacatcgacctggacaacgagatccagaacgccacgatgaaccccaaccggccgggggtgggcggcctgggcttcgatacgcgtgaaagcggcaccagccagttcgtcgaactgggcgtggccgatctgtacgccagcctgagcggcacggtcagcaccacgcgctgggtgaacgtcaacgccaccaacacgtcggccttgtccggcagtgccttctccggcgcctccggcaacatcggcgtgaacgtggcggcgggcaccggcaacctgcaggccaacagcctggccctggccgtagcccagcccagcaccggcggtggtggcggcaacggcgagtaagtgcaccaccccggccgtccgccaatggccgggttcccgggagcccctgttcctcctcccccttggggcaggggctccctcctgctgctggagaacgtgatgatcggccaccgtctctcgatatgcctgctggcctgcctgctgttgctgggcggtgcatcggcgcgggcgggcgacgtcggcttcgccgccgtgctgcccaatggcgcactgctgcagcagaaggtggaaagcatgcaggaacggcgctaccgcaacgtggtgcggcagcacaccgattacagctgcggggcggccgcactggcaaccatcctgcgccatgcctatcacctgcagaccgacgaagcgacggtgatcgaaggaatgatgggggtgtccgatccagcgctggtggccgagcgtggtttctcgctgctcgacatcaagcgctacgtggaatcgctgggcatgcgcgggcgcggctatcgtatcgatgaaacacgcctgcgcacgcttcgcgttcccggtcttgtgctgatggacgtgcgcggcttccgccacttcgtggtgctcaagcaggtgcgcgacggtgtggtcgaggtggctgatcccatcctcggcaaccgcagcctggcgctgcctgaattcctcgctgcgtggccatcgcgtgccgtcttcgtggtgatcggcagcgatttcgatcgcaacacggttctgctgcaacccagcgaacggcccagtgcccgcgcgctctacgcgcgacaggggccgatcaccgatgccgaactggtcgacttcggcttcagccacgcagacctgttctgaaggaggttccgccatgttccgtcaccgcctgttgatggtcctgctgctggcctgccccgccctgcccctgcaggcggcggacgcggcgcccgggcgcggcctgaaggaaatcccggatcccgaactgaacctgatgcggggccgttacaccgtgggcggcaatactgtcgcctggttcggggtgacgatggtctcggagtggcaggccagcaacggaagcgtgttgcagggtgcgttgaccctgggcatggacttccgcggcgggggcagcccgaaactgagcttccagcccagcgtgcacgtcaccgccgcagatgcgccgctgccggacacgcagggtcgccacatcgacagcagcggcctggccaacgccagcggcgtggtgcagagcgtgcaggtggccggcgatggcaacgtcgcccgcaatgcgaccacgctggtggtacgcaatggcgcggtgccggccctgccgggtgacggtgcccattcgatcagcgcacaggccgaaggcgtctcggcctccgcggtgctcgacggcaaccaggcacgcctgctgttgcaggtagatggccagggcctggttcagcaatggatacgcaacggcagcgtcggccagggcatcgccctggccggtgacggccagatcgccagcaaccagctgcggctggagctggtgcgggataccgcgggcggcaacctgccgttgagccagaacgtggcccaggcgattgcgatgaaccgcggcatggggccgggccggtagtaccacggcacggcgttgggggaagcgttccacaacgcaggacacgaacatgcacaccctgatgaggatcaccccgttggcgctggcggcgctggcgggcaccgccttcgccgcgccacccgcggcggatgatggcgccgacgtgcaggcgctggccaaccagctggagcagctcaaatccaactacgcgcaggaagtgcggcggctgcgcgaactggacatgcaggtgcaggcgatgcaggcgcgcctgagtgggaaggttggcccgatggccccgtctacgactgcgcccgtcgagcatggctcgaccctacagacgtcaccgggcagcgaaggctatgccagcagtgccgccgaggcgcagcaggcaaagcaggaatcgcggcgcagcgtggatgatgtgaaacagcagcagtcggcgctgttctcgcgccgcttcaccgtcgagaacagcctcacctacgcccgctacgaccgcaagcagctcaccctcaatggcttcctggcgctggatgcgatcttcctcggcaacatcgccatcgagaacgtcgagtccgattcgctcacctacaatctggccgcgcgctggggcgtcagcccgaacctgacgctcaacctggacgtgccatacctggcgcggcgcaccgtctaccagaagggcggtgccggcggtgcggcggccgcgatcgcgcaggaagaaaccaatggcaacggcctgggcgatatcggcctgagtgcgaattaccgcttgttcggcgagctcggctggcgcccggaagccgtactcaccgccggagtgaccgcgcccaccgggcgtgcgccttacggcctggactggaaagtgatcgagcgcgatgacgatgactacatccgcttcgccgtgcccaaggaacaaccgaccggcaatggcgtgtggcaggccaacgtcgggctgtcgatggtcaagacagccgatccggcgatcctgttcgccaacctcggctacgtgcattcgttcccgcgtggtttcagtgacatcgacagcaaccccgacacggtcaacccgggtgacgtgaagctcggcggctcggtctacttcggcgccggcgtggcctttgcgttcaacgagcgcaccagtctcagcctgtccttcagcgaccgcatcagcgcccgcgcttccacccgtttccagggcgggaagtggatgaaagtgattggcagcgacgccaacgcggcgtcactgaatctgggtgtgacgtatgcgctcaaccagcacaccacgctggtgaccctgctgggcatcgggctgaccccggatgcaccggacttcacgctggcgttcaagatcccttacatgctctgacccgcccgatccggcgacgctgtggccgacagcccctcgccgccggatcgcgctgcccacgcgcaggccctgtgtgtgctccagggcaacgcgccagcgctggcgacgacggcgatgatcatcagttccgccgtattcacgccgcaccttcacggtgatcccaccgcattctccgtcgattccgccaatccggcggcggcgccatttcctactctggccccacggtgaagcccaggccgctgcaggcaacgcaccgtgacactggataccacgcacttccaccctttcgcaggagcaggacatggcatttccaaccgcggtaaacgaccagatcaccgactcggtcacccaggccaacaccaaggtgctgggcgacgcgcccgccgtggcagtgggcaatctgtaccaggccaccgcacaggcgctggccaatgccgcccacaacgccaccaacgcgcagcagcagtcctacgtcaccgcgcagtcggccacgaccatgggcgtggccactctgtactcgatcgataccgccaccacggcggtagcgagcaaggaaatcctcagcacccgcgtccgcggcctgggctcctgatctgtcgttccatcgctgacccgccaacctcaaggagatcgacatggcattcccgaccgctgtaaacgaccagatcaccgattcggtcacccaggccaacaccaaggtgctgggcgacgcgcccgccgtggccatgggcaatctgtaccaggccactgcgcaggcgctggccaacgccgcccacaacgccaccaatgcgcagcagcagtcctatgtgacggcgcaggcggccaccaccatgggcgtggccacgctgtactcgatcgacaccgccaccaccggcgtggccaccaagcagatcctcggcgcgtgatgcgccggcaggcaaggagctgagccatggcatttcccacggccgtcaacgaccagatcaccgactcggtcagccaggccaacctgcaggtgctgggcgtggcgcctgccacggcaatgggcacgctgtaccaggccaccgcgcaggcgctggccaatgccgcccacaacgcgacgctcgcccagcagcagatgtatgtcacggcgcaggccgcgaccacgatgggcgtcgcgctgctctacgccgtcgataccggcgccaccggcgccgccacccggaagattctcggctgattccattgagtgccggcaatctccgttcctgtagtgctgtccaccctaggagcttccaccatggcatttcccaccgccgtcaacagccagatcaccgattcggtctcgcaggtcaacaccaaggtgcttggcgatgcgccggccatcgcaatgggcaacctgttcgtggccaccagccaggcgctgtccaacgccgcgcacaacgccaccaacaaccagcagcagtcctacgtgaccatgcaggcgtcgaccacccagggggtgtccacgctgtatgcgatcgacaccgcctccaacggcgtggccacccgcgaaatcctgggcctgcgctgacgtgtcggcccggcgtgacgccaaccaccgcgcccccgcccagggcggcgtcacgtcgggcccctgatcgatggccgcatcgcccgccaccggctacctgctggcaaccaccaacgccggatccggtgtggcgatcgcccttgccccctcgttcgcgatgtccgccacctacctggcgatggccgacagcctcggcctggcaatgcagaacgcggtggccaaccagcaacgcggccaggtgaccgccggcgcaagcctggcccagatcctggccctgatcatccagaagggagccgttccgtcatgagcagtgagaacaccgtcaacagccagatcgtcgacagcgtcagcgccgcctcgacgttgctggtggcccagggtccggcgcagtccttcagcatgctggacatggtgatgctggagacgctgggcaccgccatgcacaacgccgtcgcgcgccagcagggtgcaggcatggtcagcaacgcagcggtgaccgccacctgcgcgaagatgatcaacgctccctggccggtgccgccacccgctccggaaccccctccgccgccaccaccgcaggtcatccccctgcccggcccggtgccggcgcccccttcgcctgcggcggtgatcgccgcggccaccgcagaaggaaagaccgccatcagcgtcctgcaggcacagacccacggtgccactgccgacgctgcggccgctaccagcagcctgcatgcactccaaacgcttgcaggcaatgcggcagcgcccgcgcccggtcctgcgcccgaccccgcgtccggtccggatccggacgcaggtcccgcccaggatcccgcgccagactccccttccccttccccttccccggcagacgacgctgacgccggggcctgacagactgcaggccgcctgcggccccacccgcccatcaaggagcccgtatggacccgaggaacgtcaacgcccagatcatcgatgtgatcaaccaggtgcagacggccaccatgtcagcgaccgtcgtgacgaccagtggtgccggcaaggcctaccagtcggtggcccagtctgcggcgatcgccgtacaggatgccgccgacgccctgcgcaatgtctcaaccatcgcgaccaccgcggccggcgtggccatggcccagtacctggcgacgggggacgaaaagtatgcaagggtgctcacgcaggcgcagaacatgatgcagggggccaccgccgacttcaaccgcgtcggcaatgccgctgcgaccgtcctcaaggaatttccggcccagtgaggccgccaggagatccacgcatgagcattttcattgccggtcgttccatcccccaggccaacctgatcagtcaatcctgcaggcatgtccttcagttcatcgacggcggcgagcactggttgaagtgggccatggaatcgcatgagcaccgctacgccttctccgacgagggcacgatgctcgatggggtgcaacagggcctgcacggttcgcgcatgacatggttgccgcgcaccgggttgcagatcggcccggtcaagctgctcagccttggtgccagcgacctcggtgccctgcgcaacatggagtttgatgacgagacacgcctgtcgcacaacgaggcacaacgagtgctggaaaaacaccggctgctgaccaacgccgagctcggcgcctcgcgcgcgttcctggcttcgatcggcgcggccgacgcacccctgctgcagcagctggactttcgcgaatcggtggcgctccaccagctgtcccgtgaggtgggcatgtccgccgcagggcgcgacgatctggccgacgctgccggcttcgcgctgctgcacgcacgcaggcccatcgagtttgccgactacttccgcttctaccagcgggtgagcgcaggaggtggcagccgcgagcatcggctggcgcgtgccacccgtgcgttgcagcaggtgctgccgatcctgttcggcttcctggacgggccgcagctgccacagttgccgtcgccagagcaggtgcgcgaggcgatcgacgcaagcctggccgcgcaccggcagatcggctatgcccgcatctcgctggccgcccagcagatggcggcctgcttcgacgacgaacccgacctgctgcaggatgacagccggttgcgcgaggccgcgcggtggcagctgcgcgatgcgcaggaattcctcaacgaacatccggtttcccgtggccggctcggccaggacggtgccagcgtgcagttcgcgatcgatggttccagagcgaaggcgctgatacaggtggaggacaatgtgatcaccctgcaggattaccgccgaacccgccgccacctgggcgatgaagcgcgggtggattatcagaaggatgcagtgtgaacccggctccggcgccagatggcgatggcgtgcaggcagcaacagaggcctttgcttcggcagccggcgcggccgttgctgccggacgcctggcggcccggcaacaggcgcagaagatcctggccgatgcccaggcggcattgcgccacatcctgggggagcgcagcgacggtgttcccccctcatccccagcaggagcaccgacgatgaccttcccgaccccgcttcccggcaagcccactcccgcccatccggcgggcagaaccccgatggagatcgcccaggaactggcggacgccgcaatggctgccagtgaagaaggcatccgcaccgcgatgaaggtttcgcaacgcgcggtcgaggccgccgccgaggccgcgcgatgcgcggacgaagcggccgaacaggccgtgcagcgcgctgccgaagccaacgcgcgctgacgctgcgtctgccatcccaacgccccgggcaggcccgcgcctgcaccggggcgttgcttttactggtgcgggcttcgccggtagctgcgcgggctgacccctaccgcgcgccggaagctcttttcgaagtggctcaggtcaccgaagccgacctgcagtgcgacatcggtaatgcgcaggcgctgcccatcccgcagcagctgcttggcgtgctcgatgcgcagttgctgcagcagcagcttgaacgtcgtgcccagctcgctgcggaacaggaatcccaggtgtgactggctcacatgggcctgacgggcaaggtcgcccagcgtgagcggctctgcggcatggtccttcaggtaggccagggcgcgtttcaggccgtcgtgcaggccttcatgcgctgcccgcggcgtatccggctgcgcgggcgcaggaccgacggtctgctcaaccgcgggcagccgttgcggggcgcgcccggcatcgctggcaacgtggcctgcagccagatccggcgcgtggcgtgcgagatcctcacgacggatgcatcggccaccggtcatcaccgccagccggaccaccacccgctccatttccagcagattgccgggccagtcgtgcgcgcacagggcttccagcacatcgtcgcccagcacgcggggattgaatccatgcagctccagcgaacgcgccgccagcgcgccgatgtcctccacccgttcgcgcagcggtggaatatccacggtcaggaactccagcccagccagcagggcgcgcgagaactgcttctctctcacccgttgttccaggtccgcgctggtcgacgcgatcacccgtatcgggccggccgccagcgcgtcagcttgagcggcaggcagcccacgcatgcgatgtgacagctgcccctgcagcggcaccggcagttcgtcgacttcgtggaagtacagcgtcccgccctgtgcgcgcgcgaaccagtcgctggcttcgcccagcgggtgaacacagttcacttcgacaaacgggccctgccgggaagggccgccactgtgcagggcggcggccagctccatcttctcggtaccaaactcgccgcgcagcaggaccggcaacgggctggccgccgcgcgctccacgaattcatccatctgcttcagcgcctcgccggcgccgaccagcaacagcggccggctcaatgcctgttcggcccaggccttggcttcgtagcgcttgatcagatgcgcgcaacgctgggcaaactgctcccccagcgccagggcactgccatccagccggcccttctcgccttccaggtgcagctcacccaacacctcgccgccatagcggatgggaacccgctgcaaggaaacctcttccccggacgcagctggcaaccccgcagccgcccctgccaccgcaccacgcaaccgcacttggccaccccgcatcaccttgtgctgggacagctccttcacgaacgcgcccagcagctcgggcaatgacggatagggccgataagcgcgctgcagcatctcactgacttgcctgtgcatcgaaactcccctttggaatggcgacccgatgcatctgcaacgggcgatctcgcgatgcaggccctccggcatcatcgcgggatgctgcgacgtccacgccgcatgccgtacccgctggtcgcaccgctggtgccgtgcacgctgcccgctcccgcagtgccgggaactgccatcgctgctggaggtcggcaaggcggacgtcgtccaggccgggggcgtgcgccacagggcggcactgcctgtgacgcggcgctccctgtgttccggccatcgcgtccctggattatgggaaacgagtttccagaaaataagcatgataatgacgtgaatatccgcgccggatatttgtcgcccgcgtttccgtgcgcggcgcactgcaaagcaggtgaaggcaaggcgccgggattccatccacgctgatgatcaacgcgtctgagcgaaccagggacgggcacgtattgcgccgccgtgacggctgcaccgcctgctcgcccaggcccgcaggccaccgcgcctgcctgccgcgccgcctcccccgatcaatgacccatcgaccagcagaagattgcgcaccacgcacgggtggcattccttccgctgcacctggcctgtcggcatactcgcgctcccgaccgcagcacgatcaaggagatcgaccgcatggaccgcaccccgccacccgtgccccccaggaactacctgatgtgggccatcctgagcatcatcgccggcttctggccgttcggcatcgtcgccaccgtctacgccaaccgcagcacgtcactggtcgccagcggccagatcggcgcggccaccgaggcttcgcgcaaggcgctgcgctggatgatcgcctccttcctcaccctgccactgtgcctggcactgatgatcggctatgccctgatcgcgcgcggcatggcctgatcgcctgccgccgccgtcgcgccatgatgaatggcaggcgcgcgcggcggtggcggcggcccatcccgctcctctatagtcagtccagctcggcaggcatggtgcctgccctcgaatcacagggagttggacatgggtctggtacaggcggtgaagggtgcggtgggtggtgtgctggccgaccagtggaaggacttctacaccgtgcccacgggcctgccctcgacggcggccctgttcgcggcggtaccgcgcggcaccaatgccggccgcggctccaataccagcggctcgtccaacatcatcaccaacggctcgaagatcatcgtgccggagggctacggcctgctgctgttccaggacggcgcgatcaccgcgttcgtcgccgaaccgggtggctacgagtggcgttcggacgatctgaactcgcagtcgatcttcgccggcgacggcctggtcagcacgttcatcaagcagagctgggagcgcttcaagttcggcggccagccgggttcgcagcaggcggcgtatttcgtgtcgctgaaggaactgccggacaaccgcttcggtacccagtcggaaatctactgggacgacggcttcctcaacacccaggtgggtgcggtcacgcgtggctcgtacacgctgaagatcgtcgacccgatcctgttcgtgaagaacttcgtgccggccagctacctgcagccgggtcaggtgttcgacttcaccgacctggacaacgccgccgccagccagctgttcaatgaagtggtcggttcgctggccccggccttcagcctgtacacgaacgacccgggcaagggcaaccgcatcaccaagctgcagcaggattcgctgggctttgcacagagcctgtctgccgccgtcgagcagggctaccagtggaagtccgaccgcggcctggccatcgtcaagaccgcaatcgtctcgatcgagtacgacgccaacacccgcgaactgctgaagaccgtgcagcgcgccgatgccctgtcgggttcgcgcggcaattccaacctgcaggccagcgtcgcccagggcatccagtcggccggcgagaacggcggagcggctggcctggtcggtgtcggcatggcctcgggcatgttcggtgtcggcggcatgcagcagccggtcgccccggctgccgacgacccggtggccaagctgaagaaggccaaggaaatgctggatctgggcctgatcacccagggcgactatgacgccctgaaggccaaggcactgggcctgtaacagcaggacgcacaacgaacatgtccgatccccgaaacggcccgccgccgctgcccggatccgcgcccgcgatgccgccgcccttgccggcggcgtcgttggatgggcccggttcgccgcaggacgtccctcccctgcccggcagcttcccgctggacacctcgaaactgccacaggccatccgtgatgaagtggaagcgcccgacccggtggccatcgatacgtcggccagcgagctgaaggacggcctcaaccgctgcccgaagtgcggtgccaccgacatccggcccaaggccggcaccgacatcctggtctgcctgtactgccgtcacgaatggcatggcgcacgcgtcgaggaagagttcggcctgggcgaggccatcgaccagctgcgcggtacggtcattgcctctggcgcacgtgacatcgacgccgacacctcggcactgatgacgttcaaatgcaccgggtgcggcgctgaagtcacggtcaataccgagagtacgatgacggcgcgctgccactggtgccgccatgtgttcggcgtcaacgagcagatcgccaatggcgcggtgcccgatgcagtgctgcccttccatatcaggaaggacgatgcggtcgcgcgcatccgccagttcgtcgacaagcgccgcatgttcgcgctgaaggcattcaaggaccagttcaccccggaaaacgtggtgggcgtgttcctgccctacatgatcgtcgacagcaatgtcagcgcggccgtggccggcaagggtgagatccagacccggcagtacaccgtgggcagcgagaagaacaggcgcaccctgtacgacgccgatgtctaccaggtcgagcgccaggtcgacttcacggtcgatgacctgccactggaatcctcggccgagcgcgggaatctcgatacccgcgccaacaccaacaacatcatcaacaccatcctgccgttcgataccaagaacgcggtgaaatggaacgcctcgtacctggccggcttcacctccgaaaagcgcaacctggatgtggaaaagctgcggccgcggctggaagaccagctgctgtcgatcgcccgcgcacaggtggaaggttcggtgaagcgctacaaccgtggcgtgcgctgggaacaggagcagctggaggtgcatggcacccgctgggtgtcgatgtacctgccggtgtggttgtactcctaccaccagcccggcaagaacggcggcatgctgcactacatcgcggtgaacggccgtaccggcgaaaccatgggcagcgtgcccgtgcagcaatggaagatgctgctggcggcactggccaccggcaccgtcattgaagccctcgcaattgccttcctggtggcatcgacatgagcgacgacagtggcctctggctgttggcggcaggtccggccggcgcaaccgcgctgtactgggcgctgtaccgctattaccgcaacaccgacaaatcgcactccttcgagcacgagaccgccatcgaggccaagccggtcaccggctcggaccagcaggtaggccgggttaccggcaccgaggaaaagcgtatccgcggtgacaatgtgtatgagtaccggaaacgggtggtgcgggtaaagcccgacccgtagcgccaggccctgcctggctgcgggtagtgccggccgctggccggcattccttcggttcccgggcgccaagagggagccggccagcggccggcactacccttcgctgggctgccccagcgcacaccctcacaccgcctcccgccccaccggttcgatactcgcgcggtccgcccttccgaggatgctgcaatggctgccgtgctcgcccgtacctgcctgtccgcgttgtgctgcctggccctgcccgccctggcccaggacgcctcgttcggcttcggcgaacagaccacccacaccgaccagaccacgcaatccagcagcacccggacccagagcagtagcgcggtgaccacccagaccaccaccagcggcagctcgcagtccgggtcacgcagcgaaagcaaagagatcgacgtgggcttcggtttccacgacgacaacgacgactggggccgcgaccgccaccgtggcggccgcgatgtgcgcgacagcgatctgttcggcagctggacgctgggccaggagaacggcaacacctgctccatcgagctgaagaacatcgagtggttcggcggctacagtgcctacgtgcccgccggttgcccggatggcttcttctcggccaaccgttgggtactgtcgggcaaccagctgctgctcaccgacaccagcaacaccgtgttcgggcgcttccgcgcgtcaggcggtgggcgctggacgggctaccgtgaatcggatggggcgcgtttgtacctcaatcccaaggggcactgatcgcgccgtgcacgcaatgggcacgcgctgatcgggaagatcaggcgtccgccccgccccgccgccgaaatgtccgctcccaccggttcccgtctggtcatctatgccgccctcgcgggcaacctggccattgccatcgcaaagttcatcgctgccggcatctccggcagctcggccatgctcagcgagggcgtgcattcgctggtcgacacattgaatgaactcctgctgctgtacgggctgcgccgtgccggcaaggcgccagacccggtacatccattcggctatggccgcgagctgtacttctggagcttcatcgtcgccctgctggtgttcgccgctggcgccggcgtctcggcgtacgagggcatccagcacatccgccggccggagccggccaccaaccacgcgttgagctacagcgtgctgggcatttccatcctgttcgagggggcctcctggtgggtggcgctgcgcgagttccggcgtaccaaaggcagactgggctacttcgaagccttccgccgcagcaaggatccttccaccttcaccgtactgctggaagacagcgctgcgttgctcgggctgggcttcgcgttgatcggcctggtggccgcgcaggtgctggatatgccggtgcttgatggtgtggcgtcgctgtgcatcgccggcgtactggccgcaaccgccttcctcctggcccgtgaaaccaagggcctgctggttggagagcctgcccaccctgcggtggccgagcggatcatggcggtggccgaaaccgatccggacctgcgtcgcgcgaacggcgtgaccaccatgcagatgggaccggaacaggtcgtggccatgctcagcgccgagttcgaggacgatcggcacaccccacagattgaagcctgcatcacccgcatcgaaacggcggtaaagcgcgagtatccggagctggtggcactgttcatcaagccgcagacgcccgaggtctacgccgcccggcgcgccacgctggcggcaccgtccgcgccggaatgacgctgcgtctgcgcccgtttcaccagtccaatgccacagtgccaccaacatctgcccgagcctgcctctaccgtgccggattggttgcccgcctctcttcagatcctcccgcgcagcttctaccggcgcccgcccgtcgaggttgcgcccgagctgctcaacaaacttctggtccatgacgatggccgaacgggtcgcatcgttgaagtcgaagcgtacgcgggcagcgtcgatccggcggcgcactcctatcgcgggcagacgccgcgcacggccagcatgttcggtgaggccggccacctgtatgtctacttcacctacggcatgcactggggcagcaacgtggtctgcggagaggtcggtgaaggcgtggcggtgctgctgcgggccgtcgagccgctggcgggccttgagcgcatgcacgagctgcgccccgccgcgcgccgggataacgatctggccagcggccccggcaagctctcgcaggcattcgggctggaccgcagtttcgacggcgccgacctggtgactggcagccatggcatcgtgatcgcaagcgatgggaccccgcctccgtccgacccggtaattggtccacgcatcggcatcacccgcgcggtcgatttcccttggcgctggcacatccgtgacaatcgtcacgtatcgattcagccacggcgtactcccgcccctgcgaggaaacgatgatgaccccgctcgacaaaccactgcgacgcgaactggacatcgatggccggccccataccctcaccgtggaccctgaaggcctcaagctggtcgaaaaggggcgacgcaagggcatcacgctacgctggcaggacctggtatccggcgatgccgcactggccaccgccctgcaggcatcgctccagcaacactgagcgggcgcggcacctcacatcggcatcactccgccatgtcgatacataacgccgtgcgcactagcgtagcgccagccagccgccgcaaccgccctcgccacccagccctgaaaagcgccatggacgaagccgaacgtctgctcgaaatcgaacgactgcacctgctggatacgccccctgagccggtgttcgatgccatcgtcgccgccgcccgcgccgcgaccggcatgaccatggggctgatcaccgtggtggccgaagaccggcagtggttcaaggccaatatcgggctggagggcgtcaccggaacggcccgcgagatctccttctgcacgcatgcgatccgccacgacgagctgttcgagatacccgacgcgcgccaggaccctcgcttctcgaccaatcccctggtgaccgccgggccgcgcatccggcattacgccggcatcccgctgggctcggcccatggtgcacgcattggcacgctgtgcctgctcgacccgatgcccggcgtgctgtccccctcccagcgcgaactgatggtgcatctggcgcgggtcaccacccaggtgctggaacagcgcagtaccctgatggcgcaggtcggccaggcgaaagcgctgcatcgcgagctgaaacgcagcgaagacttcctggagcggaccaaccgcgccgcccgggtgggcggctgggagatggacctggtcaccaacgaagtgcgctggacccgcgagaccaagcagctgcacggcgtgcgcagcaactttgaaccgacgctcgacaccgcgctgtcgttctaccgcgaagacagccgcaacatcatccgcgcggccgtgcagcgttgcatcgacgaaggcacgtcctgggaggtgcagctgccaatgaccaccgccgacgggcgcgcgatatggacccgggtggtcggcagccggcaacaggtcgacggccatccgcgcctggtcggggcgatccaggacatcacggacgagcgagccgcgctcgacgcgctggaagcgagcgagacccgctaccggcggctgttccactacagcctgggcctgatctgcacccacacgctggacgggacattgacctcggtgaatcccgcggcggtgcagtcgctgggcttcgaggaaagccagatggtcgggcgcagcctgtgcgacctgatgccaccggaaaaacgcgagggcttcaaggcctacctcgctcggatccaggcaaaccacaccgacgctggcgtgatcgagctgattgccgccgacggtacgcgccactactgggcgtaccacaacgtgctcgacagcgaggccagcccgccctacgtgctggggcatgcacaggacgtcaccgcgctgaggatgcaggagcagcagctgcgcgaaatgtccttcaaggatcccctcacgcagtgctacaaccggcgttatctgcaccggctggatgaactgattgatgagcgctgggcctgcgtgatgttcgatctggaccacttcaagcacatcaacgacacccagggccaccgccgcggcgatgccgtcctggtcgagttcgccaccttcctgcgctcgccgctgggcaaggaggagacggtggtgcggctgggcggcgacgaattcatggtggtactggtcgcgcccgcggatggccggttgagcgaactggagcactggtaccaggaccacgctgcgctgtcgcccagcgctttctcgatgggtgcagccatcaacacggccggtgagcccgtggccgacaccatccagaaggcggacagccgcctctatcggacccgcgcgcgcgtgcgccgcgagcggcgcgaaggccctgccgcgcgttgatcacgccgcccgcaccgtcacccacgtcggcgcgtggtcgctggccttctcctgcagacgcacccaacggtcgacgccagcgtccttcagtcgctccgccagtacgggattcagcaacagatgatcgatgcgcagcccacggtcgcgctcggcatgttggcggaaatagtcccagaaggtgtagatcgtggcgtcgccgtgcaccttccgcagcgcatcggtccagccctgcgcgagcagccgctcgaaggcatcgcgaacctcgggctggaacagcgcatcgcggcgccaggccttggggtcgtagacgtcggcttcggtgggaatcacgttgaaatcacccagcagcagcgccgggtgcggcagttcgaccaggctgcgcgcatgccggatcaggcgctccatccagcgcagcttgtagtcgaacctgggcccgggctgcgggttgccgttgggcaggtagagggcacccacgatgaccccgtgcaccgccgcctccaggtagcggctctgcgtgtcgctgggctcgccgggcaatcggcggcggctctcgaccggcgtggtcccccgagccagcagcgccacgccgttccagcgcgcctcaccttgccagagcgcaccgtacccagcctcctccaatgacgcagccggaaacgcggcgtcggtcgccttcagttcctgcagggcaaccacgtccggcgattccctgtgcagccagtccagcagctgtggcaggcgcgtgccgatgccgttgacgttgaacgtggcaatacgaagcgtcttgcgtcgggccatgcaggaagcctcctcggtgccgggaatgagcattcactctgcgcgcccgggcatgcacgggccgtggatgccacgtcatgatgcggtgccattcgtttcacgaaccgctgccacgcgcgacagcaggctggtcacccgtgaacagtgccggagaagcccatggcggtgcgtccgctgcgcgccatctaccagatcgacccctacctgttccgcgacagcgacggccgcggctggggcacgctggatggcatcacggaaaagctggactacctgcagtggcttggcatcagccatgtctggctgctgccgttctactgcaacgccggccgcgatggtggctacgatgtcaccgatcactaccgtatcgatccgcgcctgggcgaccaggccgcgttccagcgcctggtcgatgccgccgacgcacgtggcatcggcatcatcgtcgaactggtgatgcagcacaccgccagcgcgcacccgtggttcgtcgccgcgcagcagggtgacccggcctggcgccgctggtacctgtggagcgaccacatgcctgacgacggcctgcagccgatgttcccgccgatcgaggccgctgtctggacatgggatgccgaggccggcgcgttcaaccggcacatgttctaccggcacgagccagacctcgacctggcccatgcgccggtacgcgaggaactgatgcaggtaatgacgttctggctgcagcgcggcgtggccggcttccgcgtcgacgcggtcccgtacatggtcgagcgcgcccgccacgcggacccgcgcgacgacgggctgtggctgctggaggcgatgcgcgccacggcagacgcgcagcaaccagggctgccactgatcggcgaagcggatgtccgcgcgtcccactacggtgacttcctgtgccacgggcggcggctttcgcacctgctggatttccacctcaacaatcatttcttcctcgcactggcacgcggcgatgccagcgaagtggcccgggtcatggccgaatacggcccgcacgcgccgccggacacacgcattgcctggctgcgcaacaatgatgaactggacctggagcagctggagccggatgagcgcgaagcggtgatggaacgcttcgctcctgagcgtggcatgcgcatctatggccgtggcatccgccgccggctggcaccgatgctggacggcgacatcgcatggcaggcgatggcctgggcggcgctgctgtcgctgggccaggtgccggtggtgcgctatggcgaggagatcggcctcggtgattgcctggagctgcccgaacgcaatgccgtgcgcatgccgatgcactggcatgaccgcccaggggctgggttcaccgaccaaccgcggcatgcctggcgcgcgccaccggcagacggcccctacggttaccgcacggtgaatgtcgaggcgcaacgcgcgacgccgggctcactgctgctgcgggtgcgcgagctgctgcagcaacgcaatgcccatcccgtgctgcagcaggggccacacacgctcgacccaccctcacccgcgctgctgatgctccgcttcggtgaggcaccccatcaggcactggcactgatcaacttcggcgacaacccggttgaggtggacgtacccctgcacggcccgctgcacacgctggtgggccacggcgccaggctgcagggtcgccgctgctacctgcagggccatggctatacgtggctggctgccgagggtgcctgagtgcgcagcgcaggcagtacgtgttcggcgaagtcgtcgatgaagcgttcctgctcgcggttcacgttgtgcaggtagatgcgatcgaaccccagggactgcagctcctgcagccaggcccgatgctggcccagttctgccgagacatgcacgtgctcgcgcaccacctcggcgctgaccgatcgggcctgtgcttcgaactgttcgggctggtccatgccttcggccagttccggcggcagcacgttggcgctccactgctccatcgcgccttccagcgccgcctgttcggcgcgcgcgtaggagagcttggcctgcaggtacatcggcttgcccctgccgccgccgtcctcgaacgccgccaccacacgccgcaactgcgccagtggctggctgatggtgatcaggccatcggcccagccccccatccagcgtgcggtttcctcggtgacggccgcccccagcagcggcaggggaagcgccgggcgactgtagagccgtgcctggcgcacccggaagccaccgtcgtggtcgacctgctcgccgccccacagccgccgcatcacctcggccgcatcgcgtaatgccttctgccgctcgcgcttggctggccacggctggccggtgatgcgctcgttcagggcctcgccggtacccagcgccagccagatccggcccggcgccaactgctccagcgtcgccgctgcctgtgccaccaatgccgggtgctggcgcagcatcgggcaggtcaccatgcccagggtcaatgcgctctgcaccgccagcgcgccggcccatacccagctgtggccggactgcccttgcgcggtcgtccacgggtggaaatggtccgagcacatcaaagcctcgaatcccgcctgttcggcgcgcagcgccaggcccagcaaggtggcgggcgggaactgctcatgcgatgcgtggtagccgatggtcatcacggattccgtgcggggactggacacgatggcaacacccctccagctaaaacggcgtcatggaaacgaacacctcctgcatcgggcatcgacgctgggctatcgccgaaggctacattccagcctggagcaacggcccgtcgccggagatgcagagtcacgaaacctgctgcgtcctcaatgcgggcaacgaggacgcgcatgtcacgctgaccctctacttcgaggaccgcgatcctgtcggtccctaccggatcaccgtgccagcacgacgcacctgccacctgcgcttcaacgacctgcaggatccggcgccggtaccacgcggcaccggcttcgccaccctcatcgaatccgaccagccgatcatcgtgcagcacacgcggctggattcacggcagccggccaacagcatcatgaccacgatcgcccatcccttgtgaagcaccgtgcgcagtcgtccacgctgccacgacaccgcgccctccggccgtttacccgcgccgagcgagactgccgccaggttccctttcggagagtgacgatggccctgcccgactacccacgtccgcccttcccggcgcagcagcaatccttccccggcaagaccgcgcagatgcagctccggccggaccacggcgaggacagctaccgcggccatggcctgctgcagggcaagaaggcactgatcaccggcggtgacagcggcatcggcgcagcggtggccatcgctttcgcgcgcgagggtgccgacgtcgccatcgcctttcttgatggcgagcaggacgacgcccgccatgtgcagcagcagatcgaacaggccgggcgcaaggccgtgctggtgccctgtgacatcagcgacccggcgcaggcgcgctcgctcgtcgaccgcgtggccagcgagctggacggtctcgacatcctggtcaacaacgcggcctaccagcgctactacgagcacttcgacgacatcaccctggatgattggaagcggacgttcgataccaatgtccatgccgtgttcaatctgacgcggttgtgcgtgccacacctgcgcggtggcggcgcgatcatcaacaccgcatcggtcaattccaagcgaccgaccccgaacatccttccgtactctgcgaccaagggcgccgtcgccaacctgacgctggggctggcgggcctgctggccgagcatcagatacgcgtcaacgccgtgctgcccggcccgatctggacgccgttcattccggcaggcatggccgccgaagaggtcgaacaattcggctcgcagacgccgttcggccgccccgggcagcccgcggaactggcctcggcctacgtgatgctggcttcggacagcgccagttatacctccggtgccttgctgaccatttccggcggcgcggcaacgctgtgaccgcccatggctggactgcctgcctggatcgcggattggctgctggtggtggtaccggtggccgaggtgctggtcattctcggggtggcctggctgatggtgcgtgcactggcgtggctgctcgtgcaggcccggcagcgcggcaggctggctccagagcttcatgtgggcctgcgccgcggcggtgctttgctgctgtatctggcggctgcgctgctgatactggagcgacttggcgtttcgcgctcggtgctgtggaccgcgctgaccgggttcatggcggtcggcgcggtggcgttcttcgccgcgtggagcgtgttgtccaacctgttctgttcgttcctgatcgtggctacgcgcccgttccgcatcaacgacacgatcgaagtgctggaaagcgtggacaagccgggcctgtgcggccaggtggtggacatcaacctgatctacaccacgctgagtgaccgtggcgaaggcgcgcgcggttgtctgctgcgcgtgccgaactcgttgttcttccagcgcatcacccggcactggggtgacagcggctattcgcagctgccgggcagcctgccgataaagggcaaggtgcgctgagtcgctgtagagccgagcccatgctcggctcgctgcgcgcagcgcagggtgcgtcgcggccgaacggagcgcagccgagcgtgggctcggctcaaggtgccacagcgggcgaccctactccgctgccaatgcctggatcgggtccagccgtgcggcgttgcgtgccgggaagtagccgaaaccgagcccgatcgcagacgaacatgccagcgcggcgagcaccggcccgggcgtgaacaggaagggcacccccagcgacagcaggctggacagcgcacccacggcgaaggccagcagtacgcccagcacgccaccggacaggcagatcagcaccgcctcgatcaggaactggcgcaggatgtcgccctgcctcgcccccaccgccagccgcacgccgatctcgcgcacgcgctccttcaccgacaccagcatgatgttcatcacgcccacgccgccaaccaccagcgccaccgccgcgatcgccgaaaccagcgccgccatggtctggctggatttcatcaccgccttgcggatctggtccgagttgtagatgaagaaatcgcgacgaccatgcaggcgctccagctcggcgcccagcgaggcctcggcggcattggtgggtacgttgtcgcgtacgcgcacggtgatgctctccaggcgctggctgcccagcagccgggaggcagccgacgtatagggaacgtagacggttggcgtggccccaccggcgaatgcattggcacccaccacgccgatcacctcgaccggcatgccgcccagcagcaccgtgctgccgatagggttgccagcgaacagtgccttcgctgccttctggtcgaccacgcccactgcccgatgcgcctccacctcggcatcggtgaagaaccggccggccctcaggcgcagcccgcgcacgcgcggcagatccgcaccggcgcccagtacctgcgtattggctcgtcggccgccctgcagtgctgctaccgaaccgctgaggttggggctgacactgtccacgtaactcagggccgccaggtgatcggcatcgcctaccaccagcgtctcgatctccgccgagcgcgggtcaccgaaatcggcgcccgggaagatctccagcgtgctggcgcccagcgcgtttatctgcgcctcgacctgcgcctgcgcgcctttgcccagcgcaaccacggtcaccaccgcggccacgccgatgatgatgccgagcatggtcagcagggtgcgcaggcgatgggccagcatcgaacgcaccgccatgcgcgtcgcctcgcgcacggcatcgatgcgggcgcgccgctcggtagccgccgtggatgtgcgcgccggtgcgtccgcaccctgccgcaccgaagggcctcgctcctggcgatccgccaccacacgcccatcggcgatctcgatcacccgtgacgcgtgggcagcaatcgccgcatcatgggtgaccaggatcacggtatggccctgcgcatgcaggcgctcgagctcggccatcacctgcctgccactggcatgatccagcgcgccggtcggctcatcggccagcacgatcgcgccgccgttcatcagcgagcgtgcgatggagacgcgctgctgctggccgccggacaactggctgggccggttcgcggtccgctcgcccaggccgagcgtttccagcagcaggcgggcacgcgtggtgcgcgcatcggcctccaccccggcatagacggcgggcaaggccacgttctcggtggcactgaggttctccatcaggttgtagcgctggaagatgaagccgaagtgctcgcggcgcaggcgcgccagctggtcaggcgacatctgctcggtcgcagccccctccacgcggtagctgccttcggtcggccgatccaggcagcccaggatgttcatcagcgtggacttgcccgaacccgaggggccgatgatggcgatgaactcgccggcatcgatgcgcagcgagacctccttcagcaccaccacctcgccggcggccgagcgataggcgcgcgatacgcccttcaattccagcagtgcgtcggccatgctcacatccccagcaggctggtgggttcggcatcgccaccgctgggcgcctggccgaccaccacgttctcgcccgcttccaggccagagaggatctgcaccgcggtggcggtgcgcaggccggtagtcacagcgcgctcgtgggcgcggcctttcgcatcgactacccgcacggttgcgccgttgccgttcttgtcgtcggactcgctcagggcggtcagcggcacctgcagtgcattggccacgcgtgccagctggatcgtcactttcaccgtcatcgaaggcttcagcatcaagcccggattggccacgtcgaacagccccgcgtagtacaccgctttcggcgtctgcgccgatccgccgctgttgccgctggacgcgtcggcaatcgacgacggcgctggctcaagctgctgcaggtgcgattcatagcggcgcccgctcggtcccagcgtcgagaaccacaacggttggccgggtgcgatcagttccacgtcagcctcggcgatctcggcgcgcaccgtcatcgtgtccatctgtgccagcatcacgatggtcggcgtggtctgcatcgagttcagcgtctgccccgccttggtgacgatggccacgatgtagccctcggacggcgacacgatacgcgtgtagcccaggttgatgcgggcggtttccacctgggtcaccgcctggtcgatctgcgcctgcaacgcagcggcatccgcgcgcgccgcatcgcgcgccacacgtgccgcttcgaagccttcctgcgagaccagccgcgacgccaccagctgcgattggcgatcgtacgtgcgaagggcctggcggtagcgcgcctggctggccgcatgttgcgcacgcagcgcgttggcggcggcttcggcactgcgcagggcaatgcgctgcggttgtgaatccacttcggcaatcaggtcgccggcctgcacgtgctggcccagcaccacatgcaggcgcgtgacctgcccggagacctgcgcgcccacggccaccagttctttcggattgacccggccgaccgcctgcacggtcttttccagaccggcgacccttgccggtgcggtgatcaacgcggcatcctcgccatcggcaaacgcccaccagcaaccgccgccggcaagaacggccagcgttgcggcaatgatccaggtcctgcggttgttcatcgaaacttccgggggtgcgtgcagtcgcccggtgcgaccgccagggccgcagtctggaagccccaggtggatgtttcttggagccgctgtggagattggatggagacgcgaccgccgttcagggaccgcgtcggccgctgaatccatggcgcggctccacgcaatctcgacacaatctcgaccaagtctccatcaacggtcgctagcctcggcggcctcgccgactgccagcctgccgtgcccctttcctacccggacctgccacccatcgatgtgcgccgtgcctacctggcgtggtgtgcgccttcgccgtggctgatcgcactggtgctggcatcgaccagcacatggatgtgggtcgcaccgtatccgcgactgccgttgctggccggcttcggggccgccgccctgctggggttccgcagtgacgggcccggacgcacccgccgctccgggtcgctcgcatcgctggccttgatcggcctggcgttctggtcggcaacacctccggccgccaacgtcaacctgcatctgctgcttgcgcccgccaccgccgtggtcgccaccctgctggcagtgcgcctgcgcgccatcgtgggcatggcctcgcggctgcaggcccgggtgaacgccacccccatggcctcgcgctggaacgcgctgcctgccgcggtgtctaccctgacgctgcagcagctgcgcggcgcgggttcggtggaccccagcctgcagcgctcgctggtgctggccacgctggcctgggcggccaacgaagaggcgcaggccagggaacgccgacgatgaccctgcccctgatccggcccctgcccgccctggcctcgaacccgccgtacgccatgaaatacgaaccccgtaaccgacagccccccttggtgctgattgccgaagatgagagcgagatcgccgacatcctcggtgcctacctggcccgttcgggcctgcgcagcgcacgcgccgccgacggcgaggcggcgcttgccagccaccgccagctgcgcccggacctggtactgctggatgtgcagatgcccaagctggatggctggcaggtgctgagcgaactgcggcgtcgcggcaacacgccggtgatcatgctcaccgcgctcgaccaggacgtggacaagctgaccggcctgcgtgtgggcgctgacgactacgtggccaaaccattcaatcccgctgagatcgttgcacgcatccaggccgtgctgcgccgcagtgcccgcagcgtggccgaagaacccaccgggctgatccgccagggcccgttcgagatcgacctgcgcagccacgaagtgacggtccgcaacggcgagcaggcgcacgcactgaacttcaccctcaccgaattccggctgttggtgcacatggcgcgcgcgccgcgccaggtgcatgcgcgggtggacctgctgcacgcctgcctgcccgagggcgatgcgcaggagcgcaccgtcgacagccatgtcagcaagctgcggcgcaagctcgaggatgtcggcgtgatcggcattcccgccaccatccgtggcgtcggctaccgcttcctggactgaatgatgactgcgaaaggcaagagcatcggccgccagatcagcctgtcgatcaccgtggcctcgctgtgttcgacggtgctgtcgatcagcggcttctacctgttctacttcctgctggaggtgttctatccgcgctggtatgacgagccgaagtccatgatgccctccgggctggagtggctgtggatcggcctgaccgccaccgtggtggtggcgttggccaccctgatcgcgtctcgcctgacccggcgcatcatcaccccgttgaattcggtggccgcaagcctgcgtcgcgtggccagcggtgacctggaggcgcgcgcacgcggcggcgacacctcgatggccgaggccgccacgctggtcaacgacttcaattccatggccgagcggctcagccggatgtccgagaaccgtgtgttctggaacgcggccatcgcacacgaactgcgcacgccgatgaccatcctgcgtggccgcctgcaaggcatcgccgaaggtgtattcgagccgggccccgagcagttcaacagcatgctcacccagctggagggactgacccgcatcatcgaggacctgcgcgtggtcagcctggccgagagtggccacctggatctgcgcctgcaacgcagcgacgtcagcgtgcaggtggcggcggtggtggaggcgatgtccgaggcgctgaccgaaagtggcttctcggtgagcctggacgcgcggccgtcgctggcggactgcgatccggcccgcatccgccaggcggtgctggcattgctggagaacgcccgtcgccatgccatcccctgcccgctgcgggtgcgcgtcaccctcgctgaggggcactgcgcggtaaccgtggaagatggtggccccggcgtgccggacgacctgcgcgacagcattttcgaagccttccagcgcaccgatgtgtcgcgctcacggcagagtgggggctcaggtctcggcctggcggtcgtgcgtgcgattgccgtggcgcatcacggaacggcgcagtgccgagctaccgagcgtggcggcagttcgttcgagatccgctggccggtgcacgtgcgccgttgaggcggtagacgctgccctggtagcggcccaccttggtgggcaccacgcgcgtggctgaacgccgccgatttctccacgcaatctccatcatccctccatgcccgctccaaagggctgcagatactgggcgcgacccggcagatggcaggcatccgtcccctgccctgtccccgaaccccccaggcaccccatggaactcccccacgatccggcggccgccgccggcagcatcggccagcagaatgcggccgccacgctcaaggccatcctgcgcacctacccctggcagctgaccggcacgttctcgctggtggcgctggagaacaccctgctgctggcctatccgttgttcgccggcttcgcggtagacgcgatcatcagcggcaacatcggccatgccatctcctatgccggcgtggtactgctgttctggctggtgggtgccgcccgtcgggcggtggatacgcgcaccttcacccgcatctatgccgatctggcagtgagcgtggtgcaggcgcagcgccggttgggccaggcgacgtccacttcggcggcacgcgtggtgctggcccgcgagttcgtcgacttctttgaaaagcacgtgccgatcatcgccaccgcgctggcatcgatgttcggtgcagtggccatgctgctggcgatcgagccgatggtcggtgccgctggcctggccaccctgctcggcgccctgctggtgctgccctcgttcgcacgccgcaacgagcagttgcacggccgactgaacaaccgcctggaacacgaaatccggctggtcgaccgggtcagcccctcggtgctgcgccgccactacaccacgctgtcgcgcctgcgcatcctgctgtccgaccgcgaggccggcgcctatgtggtgatcggcctggctgccgcggcattgttcgcgctgaccatcggccgccttgccaccagtgaaggcgttacaccgggccacgtctacgcggtgatgacctacctgtggaccttcgtcggcagcctggacgatgcgccgtcaatggtggatcagcttgcgcggctgaaggatatcggccgccgcgtcagccccggcatggacgatgcggaccacaagggcgccgcttgaccggtcgctgcccaccttggtgggcaccgacgagagcagcgccaaccaaggttgacggctaccaggcctgagcagtgttgccctggtagctgcccaccttggcgcgcaccgacgggagccagcgccaaccaaggttggcggctaccgggcctgagcggtgttgctctggtcgctgcccaccttggtgggcaccgacgagagcagcgccaaccaaggttggcggctaccgggcctgagcggcgttgctctggtagttgcccaccttggtgggcaccgatggaagccagcgccaaccacggttggcggctaccaaacctgagcggtgctgctctggtagctgcccaccttggtgggcaccgacggaagccagcgcccaccaaggttggcggctaccaggcctgagcagtgttgctctggtagctgcccaccttggcgcgcaccgacgggagccagcgccaaccaaggttggcggctaccgggcctgagcagtgttgctctggtagctgcccaccctggtgggcaccgatggaagccagcgccaacccaggttggcggctaccgggcctgagcggtgttgctctggtagctgcccaccttggtgggcaccgacgagagcagcgccaaccaaggttggcggctaccaggcctgagcggtgttgctctggtagctgcccaccctggtgggcaccgatggaagccagcgcccaccacggttggcggctaccaggcctgagcggtgttgctctggtagctgcccaccttggtgggcaccgacggaagccagcgccaaccgaggttggcggctaccgggatcgatagatacccatgcgccgcttggcgctacaggaactccgccatgcgctgcagctcgtcgtccagcgcgccacgaaataccttgtcgcgggccagcgacttgccggcatagcccacgctcgacaccaactcaccctcgcgcacgctcaggttggcccagcccaccacctgctcatgccacaacaccggcagtgcgtagtagccgtactggcgtttcggcgcaggcgtgtaggcctcgaacttgtacacccaatcccacagcagctcgaagcggcggcggtcccacaccaccgggtcgaacggcgccagcaggcgcacctgctcatccggtgcatggcggcgcgagcgcggattctcgtccgccggccagtaccaggtggtgccgtccagggtgcagctggccaactgctgcttggccaacgccaatgccttgcgggtctgctcggccaggtgcggcgcgccatagcccagcaggcgcaccagataggtcaggctggccgagggcagcggcgcgtacttgcgcaccaccagatcgatcagggcggcagcacgttcgacctgcgcctgttcgctggaatcgggctcggcatgctcggccaccgcgtagatgcgcgtgccgctatcgcgccgttgcacccgcagcatcccgcggtagtgcatgccatccagcagatgcgtgcttgcgttgctggtgccgccccagtagttggtcacccgcccatgcgcgaatgcctggtcgacctcgcgcgggtgcacgctgccacgctcgcgcacaaaggccagcacgtcggccgcacggcgatgggtctcggcatcccactcgcgcttggaaacccgtgggtgcatcagcgccagatgctcgcgcggcaggaagccgtagttcaccaggcaatcctcttccaccggcagacgcgtgtagcggcgctcaagatcgcccgcgcggtagtccttcacccggtggcgcagggtcaggtcctgcgcgcgagcgggtgcgcggatcgggtcggcctgcacgaagcccaaccgccggatcgcggtcagcagcgtggtcggcttgaacagggtgcgcgccaccgcgtagcggcgaaggtcatcgagagtgggcgtggcaggcatggccgcattgtattctcgacactacgcgatccgtccagtagagccaggccacgcctggctggcgtcatggtgaacggccgcgatcatccacgcatggcgtgcatctaccgaagccgcgatacctccagcgaaccgatcaccagggcccgcatgccctgcttgaactcggtgatcacctgcccttcttcgtcatccgcaatcgcgtagatggtgtcggcaccggcgatgcagtagaacgcgatcgtggccagcagccagcgcgccttgtccaccggcaggccgaacacctcggccacgtgcgcctggtgcgaggcgatcttttccagcataggcgcggtcgccaccgtgcgccgcagcaggtagggcggtagcccgggatgcgccttcaccacttcgcacagcgactccacgaaccccatcagataggcctccagcccacccggtgcgtcgaccgacgcgcgcggaatctgccagcgctggaacaccgcctccgccaccaggcgcttcaacgcctccaggttggccacgcgcttgtacagcgctgcctgggtcaccgccagttcggcggccacgttggccatggtcaggttgggcaggcccaggcggatgccgatgtcggccagacgctccggggtgatggtgggcgggcggccacgggtcggcgccgttggatcggggtgcgtgctcatacggtgcctgctcttacggtgcgcgtccataccctgctgagggtgccagcaaagggaccctcttgtccgcttcgattgatttagtttactttactcaactaattcggaatgcgtccgccgcgcacccgtaaccgagcccatggctcacctcccgccaggtccccacccagccaacaaccctgcgctgcgccctttccccgtgcttgccgtcggcagcgcgccaggcgcgctcgcgcctgcgattcacaggactctggcatgaccgttttcaacttcacttctgcacagcatcgcgctgccgccgcatcctccggcctgatgtattcgccgggcatggtccggcgctaccgggtgtccgccctcgcgctggggctgctggcctcgttcgccgcgctggccgacgccgcgccgtccacccttccgtcggtacaggtgcaggaacaacgccgggtcactgcagactatgcgggcgggcaagtggctgccggcagccgcgtcggcctgctcggcgacaaggatttcatggacacgccgttcaatacggtcagctacaccgagtccttcatccgcgatcgccaggccaaggacctgaccgacgtcattgccgccaccgaccccacggtgttcagcaacggcgtcaccggtgcctggagcgagaactacgcgatccgcggctttgcctccaacaccagcgacaccaccttcaatggcctcagcggcatggcgccctactaccgcacctcgccggaaatgttcgagcgcatcgaggtgctgaagggaccgtctgcgctgctcaacggcatgccgccgggcggctcggtcggtggcagcgtcaacctggtgcccaagcgcgcaagcgagcaaccgctgctgcgggtcagtgccaacttcgcctccgatgtgcagttcggcactcacgtggatatgggccgtcgcctcggcgccgacaggcagttcggcatccgcttcaacggtgcctaccgtgatggtgacggcgccgtcggcaagcagcgcaagaaggtacagctcggttcgctggcactggactggcgcggcgaacgtatgcggctgtcggccgatctgtacagcgccgacgaccgcgttgacggcccggcacgtggcgtcggcctggcaccgggcgtggccattccgcacccgccacgcggcgatacgctgatcaacccggattgggcctacgtggacagccaggacaagggcgcgatggtgcgcggagaactggatgtcaacgatagcctgatggcctacctcgcgtacggcaccagcaggaccgactaccgctacaacggttcgatcagcgcgcagatcctcaatccagccggcgacttcaccacggtgatcggccagctcgccttcgacatcaggaagcagtccgcagatgccggcctgcgcggttccttccacaccggcaacgtcggccaccagtgggccgccaacgtgacccactaccagcacacccagaacgactacggccggcgcagcgtacccggctgggactggaccaccaatctgtacaacccagtgtggggcccggcggcgccgttcgtggcaccgcacatctcgcataccgagctgacgctggacagcctcggcttcgccgacaccctcgccttcgccgatgaccgcgtgcagctgacgctgggcgtgcgccgccagcaggtggtcagcgagaccttcaacgtgtccacgggtgcacgcacctcgcgctacgacgagagcgccaccacgccggcagcggccctgctggtgaaagccaccgacgcgatctccctctacaccaactacatcgaaggcctcagccagggcgccaccgcgccgatgaccgccgccaatgccggcgatgtgttcgcaccgttccgcaccaggcagaaggagctgggcctgaagctggacctgggcagcttcgcgcacaccttcagcgtgtacgagatcaagcgaccgaacagctacaccgacccggtcacgaatatcttctcgtttggcggcgagcaacgtaaccggggcgtggaatggggcttcttcggcgcaccaatggacggcgtgcgcctgctcggtggagcggcctatgtgcagccgaagctgacccgcacggccggtggcgtgaatgaaggacgcatcgccaccgccgtggcgcagcggcaggccaagctgggcgtggaatgggatgtgccgaccttgcagggcctgaccctgaccggcaatgccacggcgatgtcgaggcagtacatcagtgccgacaatagcctgtcggtgccggggcgtacgttgttcgacgtgggggcgcgctacagcaccaccgtggcgggtcgatcgcttgcgctgcgggccagcgtgaacaacgtgaccaacaagtcgtattggggcatgccgttgttgtcgagcctggcgctgggtgcaccgaggacggtgctggtgtcggcaacgatggatttctaagctggcgtggaacccctgtagagccgagccatgctcggctccgtttcgtccgctgagccgagcataggctcggctctacaggacgtcgggcaatccgcgaacggcatccacgcatggcgtggatctacgtgtcattccggatgcaggcgatagatggcgtggctggtcaacgccaatgccgccagcttcagcccttccattacgcgatcgcccacgtactgttccgggccgccattctggcgggcgcgttcggccgccagcaggatctcctgcacgatacgcagcccggccagtgcaccgtcggcgtcggccaacgccaggcaccggcccggcagctgatggcgctcgggccagggctggccgtcggcagccgcgcccaacccgatgcgatgcagcagggccgtcaggttgttgggatcgggcgggatgtcgtggccttcatcggcattggccggggcgtgctgatgggggaactccgatgcgttcatggcaggtctccgtgcaaggcatgcgggaccaccaaccttaacaatcaaggcggcggacggtgcgtggctggaaatcccgtgagtcagtgctatacccgggcggtgggcttgcgcccacctccacgcaccgcccgccatggaacgcgaacggaatgccagccgacgccgcgcaaggcgacgccggctggcaagcgtaaacagcacttactcaacggggtttccaggccccggccaccctttttcggtggcaccccatcatgtgcacaacggggtggcaggcgccaacaacccaagtgccaagacagcaacgttcacgcagtggcagcattgtcgcatatcgacaatcgagccgaagattcaacaacttgcgccacgccaacggcggcgttccccacccgcatcggcaccacgcgttccttgaccgcatccggctttcaagacgcgcgacacgccagttccgacattacacaagcagatgggcaatcaacgccagcaccgccagatgccccacgtagtagccgtagaacagccagcgccagcgcggcagctgccacggcacccgcgcggccagcagcaccaccggaacggccagcaccgcccagccgttgtggttggcccagcacaccgccgcaagcgcgaccagcagcggccaccacgcccgatgccggaacgcgatccaagccagcagcacggcgccaacgccggcccactggtagtccacgaacatcggcagcacgccggcagccagcaacagcagcacaggccgattgttcgcaagcgcatgcacggccaccaccgccagggtgaaggcgagcaggatgttgagcggcagccaggaaccgaacgcaagtgcgtgcaacggctgcgcgatcagcccccatagcgcgagccggcgcatcgatttgcgcaggtcggcgcccggctgggccaggttgcaggccatcaccagcgcgaacagcgggaaggcgatacgccccagttcgctgaccaccggcacgtagcccccgaagaccaccttggccacgtggtcgccggtcatggccagcagcgcgatccacttcaacagctcgcgcgcgccgctgccgaggctgaggttgaacgtggacgtcccggtcgtggtcgcttgcatcgcggaagcttatgcgcatcggccagcgcatttccagcgccgcgcaggagcccgccactgcaagccgtagatggcggcgctatgctggccgcccctgcttgtgagacacccgccatgcgcaccctgtacccggccatcgagccctaccgcgaattcgccctgccggtgagcgatctgcacacgctgcatatcgaagagtgcggcacgccggagggcattccggtggtgtacctgcacggtggcccgggcgccggtatctcgccgacccatcggcgcttcttcgacccggcgcgctaccgcatcgtgctgatcgaccagcgcggcagcggccgttccacgccgttcggcgagctgcgcgacaacaccacgcaggacctggtggcggacatcgaaaaggtgcgtgagcacctgggcatcgagcgctggctggtctatggcggctcctggggctccacgctgtcgctggcctacgcgcaggcgcatccggaacgcgccaccggcctgatcgtgcgtggcgtgttcctcggtcgtgagatcgagaaccgctggttcgccgaggccgatggcggtgcgcgctggatcttcccggagcgctgggaccgctacgaggcttatatcccggaagccgagcgtggcgacatgatcgccgcctactggacgcgcatggatggcccggatcaagcaacccgtatcgaagccgcgcaggcctggctgggctgggaagacaacgccgccaccctgcagcacgacgtggatgcgcaatccgccgatgatccgctggatacgctggccaaggcccgtattgaagcgcactatttccgcaacggcatcttcctggaacacgaccagttgctgcgcgatatcgaccgcatccgccacctgcccggcgtgatcgtgcaggggcgctacgacatcatctgcccgccgcgcagcgcgtgggacctggcgaaggcctggccggaagcgcgcctggagatggtgacctccggccacagcgccaacgagccggccacggtcgatgcgctggtgcgtgcgacggatgcctttgccgacggcttctgaacgcctggggcagtgccggccgctggccggcaccgccgcaacacactcccgcgtgcgactacgggttggcgtcaaacaccacggtcatgttgccttcccaatgcgagcctggcgccttcagcatctctgttacggcggcccgtcctgcggtgaaccgcaaggtcgaccgccgctgcatcagatagccatccggcgtgaagcgcggcgcctgtgcgtcgtcgggtaacagcggtgtgtcctgcgccgggcgcccatcgcgcagattgcgcatgccgggcagggtgacgtccacatccaccggtacaacctccccaagcgcgtggttgcgaatgccgcagcgattgcctgcgtcgtgctcacagcgcagcttcatgctgaagtccgttgagctggtcagatggaatggcagctcctgatagaggcgtgtcggggcacggccctgatcggtccactgcgcccaacctgcctccggcgccaagtgcacctgcggattatcacttgggaaacgtacctggaactggtgggacaccgtgaagcggaacttcaacgtgatcggttcggtcgtgacgtcatcaccaaagtcaatgtccctgcccgcaccccccgcagtgtaggtcaactcgccttcatagataccgtcgatcagagacaggggcgaaggtgccgtgatgagaagacccagaccgaaccaggacatcgcatagtcggccggctgtgaaagcgctgtatccccctgcgagttgcacggcaccggcatctctggattgcggacgatccatccaaacctgacaaatgatccggcgccagccgtatgaacgtagctgcaccctccacgcactgatcgtgtgaatacgggattggatccacctccgggcgtcacatgaccgctgacggtggctatcgtgattcgcacttcagcttcagtacccgcgacggtgttacgtagcatgacggtccggggagcgggcaaaccaagataaaagcgcttacgaacatcaccattgtgctcgtaggttttactccactgcagtggaacatcgacggagtaggcgccatcatccgcacagaactccggccgccacgagcagtagctgccgcgcggcgttgtattccggaagaccatccggcccgggtccagggctgacggggcaaactctgccgtgaccagcacttctgccgcgcatgcacttgcggccgcgccaagcccaatcacgaccagccctgcgcctcgcagcgctgccatcagcgagcggattctcatttcgtatgctcctcggttctcgcgatcgacggcgggcatcccgtcgcccccaccatcaacacatccccttccctggggtagcgcccttcctccatcgtcagcgtgcagctgaccaggttggggtaacgcaactccaccaccggcgcacgggcgctcagttccagggtaaagaagccatcctcctggctgacgctgcggccggcgtggttgatcacctgcacgccgcgcacaccgttgccgtctgcatccagtacctggcccatgacggtgaaggtgcgcagcacgtccagcgtggcatgcattacgccgcccttgttgaggtgatagctgacgaccgagggctgcagcgttgccgacggcgcatgccgcccctggaagtcgaactgcacgtggcctgcgcgatacgcggccaccggaacgaagttgcggcccgggcgcagcgccacgccgccaccgtggctgtcgtccgcacgcagggcaagatcgggataatcgctgcggacatcgacaatcaggccggtgtcggcgcttctgccgcgcccctgccccagcacggcggcgcgcccaccgccaatgaccacggtgctgtcgaggttggcggtgccgctgacgcggcccgacgccgcgccgcggtagacctgcatgtcaccttccacaaacgcgccctgcagcgaggcacccgcgcctgcgcccagcccgccccgttcggcggtgaccgtgccattcacgctctgcagcaccgctccgtccacgcgctgggtggcggtagcggtcacataggtatcgcggcgaccggcatcgccggtgcggctgcccaggctgccgctgtagctgcgtcgatcgctgcccagcgagacactgaccgtcaggtcgatgccgcgttgccgccggtagcctgtgtagcgggcgccagggcggtcataggcggaaacgcgccagttgacatcgtgcttgccgaacaccgtctcccggcgcccgtaagagacatcgatgccggtcccgcgcgtgaagcccgaactgcgggccacgcgcacgctggcggtatcacggtgcccgaaacgatgcgtgatcgagacggccgtggtgtcctgccagccgccgcgggtctcccagcgtggtgcgctgccggcatccgccacgacgcgctcgcgctgctccacccaaccgcgcgcatggttggccaccaccgaaccggcacgatagcggtacaggccctgcaggtccacgccgcgcccggcgtcgctggaggtatagacattggtgtaggtgctgaagcggtcactggcctgccagtccatcgacacacccgccgcatgccgcgcgccgatccgctgcacggtggccccggccaccgcacgggaatgcaacaggtaattgaccacggcacccgccgcggcaccgccctcgcgggtgcttccggcgctggccagcagcccgcgctgctgccctgcgaatgcgctgtagcgccagcggcggctgggatcctgccagcggctgggcttgtggatggaggcgctttcgcgggacgcttctcgaccgtcctggaccacccgcagttccacatcgtagatgccgccgggtagccggcgcgtatcgatttcctggatgccgggcttgacggcctgcgtggacagcaggttcccgtcgcgatagatctccaccacgccttcgccgctggcggtgacatagacgggatagacactggggcttcgcgtatcggccagcagcacgtccgaggatccgaacatcaggcccagcgccgtatcgttctgcgtacccggcgcgcggggctggcgcacaatgccctcgaaggtgggcaggaagtagccggcgcgaacgaagtgatcgcccagttcgcgctgggcatacagggcactgaggtagtgctcgctgctgccgggctgggcgtagtactggtagctgccaaccgtgctccagtggccggcactgccgcgcagttcggcgctgtagcgtacggtggcctgctgttcctggccgccgtgcacggcaagactgttgcgcacgatcaacccccggctgcccgcgtccggcaaggcgatgtggcgccgctccttctgcgcgccggcaggcgtcagtacactcagcagcgagttggacagactgtagtgcagcgctgccatgccccggcactgctgcctgcatacgcccagcgccatcggttcagcgagttgctcgccccaacgggcacgctcggtctgtgccagccggctttcgtggctgtcaccaaagccgatcacctgcacccggttgtcttcgtgcagcagaacctcggcgtcacccagatactggccgtccagctccacgcgcacggtgagcgggttgccaaacaggtgctcgcggaattcggccggcatgcgttcgcgctgctgcagcaggctgggcagctcgcccggcgcgaggccggccgcatgcgctgaggtggcaaggaccacggcaccgatcgcggtcgcgagccgggccagtcggaatcgacggtggttggaggacgagagcatgggcgctgttccggcgtccccgccgcatcattggatgcgacggggcgcctgaaaggactcagggagtgatgtcgctttcgaagatcatgtggaactggccaccgtagctgccctgcttgtagccacccgacggcgcggtcggcgcgatggcgaaggccagcgacttgcccgcggcggcctgggacgcgttggcaacagtgatcttggccgcggccgttgccggaacctccacgttgtccagcttcaccaccaggtccacgacgtctgcggccgacgccatctgtgccggcgacgtcaggtaggcagtgatggcagccggcgacttgatgttgatgacgcgcccggtcagttcgcccagcgtttcgcgcgcggtgtcccacggcaggttctgcggcaggccttcccagccgtcaggcgtggacacctgcaggccagcggtgttcgggacgtcggcggtcacgttgacggtgatcgacttggattcggtggctgccaggctgacagccggtgcgatgagggctgcagcggctgcagccagggcgtacttcttcagggacatggaaatgctccgggatcggtggatggatacgatgggatacgacgccaggacgaagacacagcctcccctccgggcgcctggcgaacccggtggggacgttgcagaaaggggagatgggcggacgatcagcggcgcgagtcgatgctgcggcggtcgtcgccctccctcaggtcgtagcgggcgaaccggctgtcgtcggcctgcagcgcataggttcgcccgggccggacatggacgatgatgccgggcgtgcaggcatccggactgtttcgctcgcagtaccgcaggttgtccagcaccaccgtggcgttgccaccgttgtgcacgtgaccgtcctgcacacgggtgtcatagcgcgtgttccgcggtgccacgaacaggatggtgccgtagccggtgaacacgcgaactgccgaggtcagcccggtgatctcctgcacctgcgcatcgctgagtgagaattcctcggcgctgggcaccaccggaatgaagcggagccggtagtagcgctcctcatcacggtcaccgcgatagaccaggcgcgtcgcctgttggccgttggcggcaatgatcaggcggctggggctggcgatcaccccgtgcgcgccaggtgcattgcgtaccagcgccacggtgtccactggcgtttcgacaaccttgccgtctgcatcgaagtgcatctgggtgacctcaacgcgcacgtatgcggtcacatcaccggtattgcgtatgcgcttgagcaggttgctctgcgctggcgcaagatgatcgaacaggaggcccacattgatctgtggtgtcgtggcttgggcactgctggcgaacagggccagcaggaggagaaggagtgcgcgttgcatgacgaacccgcggggagaggtgagcgattagtttcacggcatctttacaatcaggccatgcaacaacttgcaaaaaggtcagatatttccgacctcgcaaagtggctccgcccaggtcaacccggaaatcctgtccgcgcactcggccgcggcggtctggcccgttgcacatcgcgacggcacgccctggaacagcatcggcggctggcgcacgcatggggcgtgcgggtgaacgggcgcccaccgctgcatggcgaccccgccggttcttcgcagctcgcttacggacccgggccgaatatccggccgtggccatccacagccatggcccgcgtccccacttctggagcctgtcatgaccggtattcgctacgttcctgctgtcctcgtcatcaccatcggcctgctgctgggcgcctgttccagaacccaggaggcgagcaaggccaccgccgccgaggacgtcaccgaagtgaagctgataccgccgtatgagtcgctggacaaggacaaggacggcatcgtcacgctggccgaagtggatgccgtggcacccgactgggccgagcgcctgcatgcctgcgataccgaccgtgacaagacgttgacccgtggcgagtacgacgtctgcaagcagaccagcggcgcgcattgacccaccactgaaccctcgatcggcaccgcatacgcccggctataccaaggtatagccgggctaacccacgggcctctaggcctgccccattcaggggcggacaatagcgccactggccagggcaaccctggctggccccctcccctcatggagacgcagatggaccccgaccctgccgggcgcaccgcgccccggatgcccgcttgttgcctgttcctggcgcctgcccgccggtccctgcctgcctgagtgacgggggaccgccaggcgccgcctgcctggagatcgcccccatgtcctacaagatcctctacatcaccctgcgccgcctgatcggtgagcgcgatgttgccgccctgcgcagccagctgctgcagcacggcccggtcatgtttgcccgttcgctgtcgctcggttcgccgcgcgtggtggccgacgcgctgtcgctgctgccgatcagcgagcggatcaccgtgctgcgccatctgccctacccgctgcgcgatgcgatgaagccgctgtgcattggtggcagccagcgcctgcacatgcagccgtggtcgccggcggtgctggcgatgcgccacgcctgaactgtctcacccattccgttcgtgttccggctgcggccggctctgacattcgaggagcgtcccatgagcctgctcaacgcctggttcaacgccttcctgcgcagccgtcgcgcaggcaacctgttccgccgtcgtgcgatgcccgaagccggctttggcccgggcagcgccgaagcggcgccgttcgcgcttaccaccggcctggtcacccttgcccagcaggaggaagccgagctgctggccacgctggagtcgcatgccgatggcctcagcccgcatgaagccgaggagcggctggccacgctcggccccaacgaggtggatcacgagaagccgctgccgtggtggcggcacctgtggcagtgctaccgcaacccgttcaacctgctgctgaccgtactggccgcggtgtcctggctgaccgaggacatcaaggccaccgtggtgatcggtgcgatggtgctgctgtccacgctgatccgcttcgtgcaggaaggccgctccaaccgtgcagccgagcggctgaaggcactggtcggcaacaccgcgcgcgtgctgcgccgcaatccgggcaccgaggccgccgatgtggccgaccagtacttcggtgcgcacctgcacagccgtcgcccggcacgcctgctggacctgccgatccgtgagctggtgcccggtgaccacatcgtgctgtcggccggcgacatgattccggccgattgccgcgtactgaccgccaaggacctgttcgtggcacaggccgcaatgaccggcgaatcgctgccggtggaaaagttcccgcaccccggcgatggcctggctggcctgctggagcagcacaacctgctgttcatgggcaccaacgtggtgtcaggcaccgccaccgccgtggtgctggccaccggcaaccgcacctacttcggcacgctggcccagcgcagcaccgctaccgaccgtgcgcccaccgcgttccaggccggcgtcaacagtgtcagctggctgctgatccgcttcgcgctggtgatggtgccgttcgtgctgctgatcaacggctggaccaagggtgactggaccgaggcgttcctgttcgcgctgtcggtagcggtgggcttgacgccggaaatgctgccgatgatcgtcacctccaccctggccaagggtgcggtgctgctgtcgcggcgcaaggtgatcgtcaagcgcctggatgcgatccagaacttcggcgcgatggaagttctgtgcaccgacaagaccggcacgctcacccaggacaggatcgcgctggagcgccacaccgatgtgttcggtcacgattcggaagacgtgctgaagttcgcttacctcaacagccacttccagaccgggctgatcaacctgctggaccgcgcggtgctggagcacgtggagctgcagagttcgctgcggctgtcgcaggactaccacaaggtggatgagatcccgttcgacttcgagcgccgccgcatgtcggtggtggtgtccgagcgcgaggaccaccatgagctgatctgcaagggcgcggtggaagagatgctggcggtgtgcagcaccgtgcgcgagaacggccaggacatgccactggacgagcgccgcctggcgcgggtgcggcagaccaccgaggaactgaacgaacagggcctgcgcgtggtggcggtggcgatgaaggagaccgcggccagtcagagcgcctactcgcaagcggacgagtgcggtttgacgctggtcggctacgtggccttcctggacccgccgaaggagtcggctgcgcaggcgctgcaggcgctggccgcacacggtgtcgaggtcaaggtcttcactggcgacaacgaactggtgaccgcccgtgtctgcgcacaggtggggctggacgcggacaccatcctgaccggcccgcagatcgagcgcatggacgacggcgcgctgtcgcgggcgctgcaccaccatcgcgtgtttgcccggctgacgccgctgcacaaggagcggctggtacgcgagctgcgggcgcagggcaaggtggtcggcttcctcggtgacggcatcaacgatgcgccggcgctgcgcgcagccgatatcggcatcagcgtggacagcgcggtggacattgccaaggaggcggccgacatcatcctgctggaaaagaacctgatggtgctggaggaaggcgtcatccagggccggcgtacgttcaacaacatgctgaagtacatccgcatgaccgccagctccaacttcggcaatgtgttctcggtgctggtggcctcggccttcctgccgttcctgccgatgctgccgctgcagctgctggtgcagaacctgctgtatgacatctcgcagatcgccattccgttcgacaacgtggatgaggaactggtacgcaagccgctgaagtggaacccggcggacatcggccgcttcatggtgttcttcgggccgatcagctcgctcttcgacctgagctgtttcgcgctgatgtggtacgtgttcgatgcacgcacgccggccgaccagggcctgttccagtccggctggttcgtggtcggcctgctgacccagaccctgatcgtgcacatgatccgcacgccaaaggtgccgttcctgcagagcatcgccgcgccgccactgctgctgatgaccggcctgatcatggccatcggcgtggccctgccgatgagcccgctggccggctacttcaagctgcaggcgctgccggttggctactggccgttcctggtggcgatcctgttcggctatgcggtgctgaccaccgcgctgaagaagttctacatccgtcgttacggctggcagtaagcacccgccgcttgtccagggagaaacgcaatggacatcaatccgaacctgccggcgttcaacgccggcgccacgctcagctcgctgatcagcctgtcggtggcattcgtgctgggcacggtcatcggcctggagcggcagctgcggcaacgcaccgccggcctgcgtaccaatacgctggtggcggtgggtgcggcagtgttcgtcgatctggcggtgcgcttccatgacctgtacggcggaccaccctcgccgctgcatgtggtggcctatgtgatctccggcgtcggcttcctcggcgccggcgcgatcatgaaggacggcgcccaggtgtccggcctgaacaccgccgccaccctgtggggatcggcagcggtgggagcctgcgcgggtatcaagctgctgcccgaagcagtgctcgcagcggtgttcgtgctggccgccaataccctgctgcggccggtggtgaaccgcatccagcggcagccgctgccggaagcgttcagcgaggcgacctatgcgatcaacgtggtctgccagcgcgagcagcaggccgaggtgctggaccagctgttgctgctgcttgagcaggcgcattacccggtgcgcgcggtggaccagcgcccgttcggcgagcgcgatgtggagatcgaagcggtgctgtatgccaccacggtggatgccggcgaactggacgccgtacttgcgacgctggcgaccacgcccggtgtgctgcagggattctggaacgccagcctggaggagtagtgccggccgctggccggcaacaccgtgcaccgctttggtaggtgccgaccttggtcggcagagaaccttcagagaccgtgtccatccctgcggtagtgccggccgctggccggcaacctcatgagctccggcaacaccgtgcagttgccggccagcggccggcactaccaggcatcgttctggcttgtgccgaccaacggtcggcacccacagcaaaagagcctgccgaccaagatcggcatctgccgatggcggctttgctatcctttcaccccacgccagggagccgtcccgatgccatcgctgtcgccccgccgcccgctggtgctgctggccctgatcgtcgtgatggccgcgatcttcctgatcgacaccgtcaccgattacgcggttgctgctgcctgcttctacgcagcggtcatcctcgcggcatcgcgcgtgctggccgcccgcggcctgatcacgctggccatcgcctgcatcgcgctgaccgggctgagtttcttcctgacccgcttcggcacctaccgcatcggcctggtcaattcggtgatcggcatgctggtgatcggcatcaccacctacctcgcactgaacatggaagcggccaaggccgccgtgcaggaagcacagggccgtctgctgcgggtagcgcgcgcctccaccgtaggcgagctgaccacctccatcgcccacgaagtgaaccagccgctggcggccatcgccagcagcgccgaagcctgccaacgctggctggcgcaggacccgccgaacgtggacaaggcacgccagaccgtggcccgcatcctggccgatgcgcaccgtgccggcgatgtgatcgcccgcatccgcggcctgacccagggcgcggcaccggaacggcgcgccttcgacctaaaccaggcggtggaggaaatgctggcgttgtcgcgcagcgaactggaccagcatggcgtggccgtggccctgctgctggacgccgacctgccgccggtgcaggccgatcgcgtacaggtgcagcaggtgatcggcaacctgatcctcaatgcggtggatgcaatggaagccgtacccgcaggcgaccggcgtctgtcgctgctgacccggcgtgagggccaacgggtcagcctcagcgtccgtgaccgtggtgtcggcctgcccgccgagcatcccgagcgcgtgttcgacgcgttctggaccaccaagtcacacgggttggggctgggcctcagcctgagccgctcgatgatcgaggccaacgacggccagatccgcgccgaacgaccggcaggcggcggtgcctgcttcgtcttcgacctgcccgtcgccacggatgtccaccatgcgtaagcccactgcacccatcgccgatccggcgcccattgtctatgtggtcgacgacgatccgtcggtgcgcgcggcgctggaagacctgctggcctcgatgggcctgcaggtgcgggccttcgcctccacccaggccttcctcgaacacgacctggaagacgcgccggcctgcctggtgctggacgtgcgcatgcccggccagagcggtcttgaattccatcgcacgatgggcagccatggcctgcagctccccgtggtgttcatcaccggccacggcgacatcgcgatgggtgtcaacgcgatcaaggacggtgccatcgaattcctgaccaagccctttcgcgaccaggaactgctggatgcgatccacaagggcatcgagatcgaccgccagcgccgccgcgagggcgaggcgctcgatgccctgcagcagcgctggaacacgctcaacgcgggtgagcgcgaggtggtcgatggcgtggtgcgtggccgcctcaacaagcagatcgccggcgacctcggcgtcagtgagatcacggtgaaggtgcgccgcgcacaggtgatgcgcaagatgggcgcgcgcaccctggtcgacctggtgcgcatgtacgaccgcctgcaggcggggacgccatgaacgtccacgtcgccttgctgcgcgcggtcaacgtcggcggtaccggcaggctgccgatgcgcgaactggtggcgatgtgcgaggacgcaggcttcgccgatgtccgcacgtacatcgccagcggcaacgtggtgttgcgcagctcgctcgacgaggcgggcgtgcgccaggccctcggccagcggctccaggaatatgccggcaagccggtaggcgtactggtgcgttcggccagcgagatcgcaggcgtggtggcacgcaatccgtttccggatgccgccggcaaccgtgtggtcgccctgttcctcgacggcagcctgcctgccgacccgcttgatggcgtgaccggccggcgcgacgaacagcttgcactcggcacgcgcgagatcttcatccactacggcgccggcatggccgactcgcgcctgcgcattcccggctcggcacagggcacggcgcgcaatctcaataccgtcgcccggctcgcggcgatggcagcggaactccgctagatctcgtccggcaggctgtagaccagccggtagtcgtggcggccttcactgatggtgatctccagtgtgccgctcaggccgaacagtccttcactgcccgaatcgggcaccaccaccacgctcagctgcggcgtgccacgggtcatcaacccgttgtgctgcagggtgaacccaccctggcgcccggccagcgtggccgttacccgttccatcgccacgtagccggccgagccctgcaccggcgtgcggaaggccagcatctggccgacgctgctgccgtgcaggtcgccggcgaaggtcttgttgatcgacatcaccgcaattgggccgtcattgccaccgatcggccgcagatccacttcaaacgtaccgtgtgcttcgccctgcatcctgctctcccctctggtcggttcaacgctgctacttcttcgtggccagcacgatcaccccggccagcaccaggccgatgccgctccactcccgcaggctgggccgctcgcccagcagaagataggccagcacgatcgccagcaccacgctgaacttgtccaccacggccaccttggccagctcaccgctctgtagtgcgcgaaagtagaacagccacgacgcaccggtggccagcgccgacagcaccaggaacagctgggtccgccccggcagcagcaatggattggaccatttgccggtgaccatcaccagcggcaggatcaccgccgccaccaccagggtacggatggccatggccaggtccgggtcgacacccttgacgccgaccttggcgaacagcgcagtcagcgctgcgaacacggcggacagtcccgaccagagcaaccattgcggtacgttctgcacgaagccctcgcttgccgcaaccgatgagcgtgcgccaacgctactccaccctgccatcggtggggcttcacctgcccatcaccgccgctacaatgggacggaatcgccaggggggcgatctgcagggaatgcgccatgcttgaacaggacaccaccctcgcccataccgggccgtcggcccttgaccgggcccgcctgtcgtgcgccgcacggctgccgctccccttccccttcgtttcgcagcaacctgcccgttccgcgcggcaggttcctcattgcctgccctgaccggagccgtcgaaatgtccgagaacaccctccttgccacgccggccgctaccgcgccgatcaagtacctcgaccgcgccatggccacgctgcgcagcctgggcctggccgctccccaggacaacaacgcaccggccatcgcgctggtctcgcagctgtccacccttgaccagggccgcgtggtggccattgcccgcgtgctgcagcagtccgggcatttcaatgccgtgatgcgtgatgaaatcagctcggccaaggtgtccgaccgctataccgagatcatccgcgccttcgacagcatccgtgacgatgccagcaccatggtcgagcaggtgcgcgacggcaggatcgacatgggcgagcgcctgcagaacctgtggatgaaggtcacccgcggcgacatcccgagccggttcgagaagatccgccgcacattcctggaagtcagccgcgattcggccgagcagctgcagcgcgagtcgcgcgtgctggagatgtacggcgacttccgcctgtcgatcaaggatgccgagatccaggcccatgagctcttgaagctgcaggagcaggcgctggccgatgcccgcgaggcgctgaagcaggcgcagcagcgcgtggagtcggccgatccggccgccgatgccgccgacaccggccgcctggtcatggcccgcgacgaggccctgcgcaacaaccaggccgaggagtcgcgctaccagctggccaaggacctggccgagaacctgcaggtgaactacgccacctccgaggcgatcatgctgcgcgtgcaccagtcgcacgagatcaagcgccgcgtcaacgagcgctcggtggtgttcttctccaccaatgaaaccagcttcaccgccttgaacctggccttcaccacgcagatgggcctgcatgagtccacgcaggcgctcaatgcgatgaccgagggcacctccaagggcctggaagcggtggccaacattggcgatgacgtgctgcacgagggcctgaaggccggctacggcgccaccatcggcgtcgattcggtgcgcaagctggtcgatgcggtggtgcgcttccaggagacctcgctgcgggagatcgagcagctgcgcggccaggcgacccgcgactcggccgagatcgccgagtatgtcgaacagggcaagcagcgcttcgccgccctgctgcaggcgccgccgcgcccggagtcgcgctgaggtgagtgcgacgatggcccctgccgagctgcaggctgcgctgctgaccatggatgtggtcgaccagctgcgctaccgcaacgccgaaatgaaggcgctggccgacagcggccacgacaaggcgacgctgaagcagcgcctgcttgagctgtaccgctcgcagggcatcgaggtctccgacgagatcctcgaggccggcatccaggcccagcgcgaccagcgctacctctacaccgcgccgcgtggctggaaggcgtggctggcgcggcgctggatcgatcgggcccgcctgttgaagtgggcgctgctggcggccttcctgctgctggtgctcggcatgctgctggtcatggcacgcagcttcggagcgttcgtgcacgagagcaacgtgcagaagaacgtgcaggtgctgaacgacaaggtggccgcgcagcaacaggaggctgctgcagcgcgcgccctgctggcggcacaggaacaggccctgcaggggctgctgccacgtgccacggccagcggtgggcgcctgcagccactggccgaaggcgcacaggccgcgctggccgaagcacagcggcgcttcgccggggttcccgccgcactggccgcacagccgaccctggtgcgcaaggacaagctcacccggctcagcagtggtggcagtgccaccggcgagcaggccgccgcgcaggttgagcagcatcggcaggccgccgcgcagctgctggcgaatgccagggaaacgctgccgccgctgaccgagcgggtgaacatcctcggccaggcgatcgaggccagcgagctgctggataccaccaacgccgctgcaaaggcggcacgcctcgcgccggatgcagagcaggcgcgcgcacgcgcctacaccggcggcgacgtggcactgcgcgcgggcgacatcgccgcggccggccaggcggtagcgaccctgaaggagctgatcggcagcgccgccacgctggccgcgctcaacgagcggttggcccagctcaaagccgacggcctcgccaccggtgtcgccggcgaagaccgcaagcgcttcgagcgtgcgctggagcaggccgcccgcctgatccgggtcgagacgctggccgaagccgggccggccctggacgaggtcagccagctggtggggctgctgtcgcagaccctggtctaccgcatcgtcaaccgtgacgatgaacgcaccggcgtctggcgctacaacgagaaggccaatggtggccgcaactactatctggtgaccgaagcgctggacgaggccggcaatgctgccgaactgccgatccgcaacgaggaaaccggcaaggaggaacgggtctcggtgtttgccgtacgcgtgcccgaggccacctacaaccgggttgccgccgacaagcaggacaacggcatcatcgaagacgaccagatcggcagcaagccgcgcggcagcctgtcgccgcggttccgcatgcccgccaccggtggctacatcacccaatggtgatgggtaaggaactgacatgagagacctgaacgacgcgattgccgatgtcgaaaccgatatcggccaggtgcaggcacaactggccgcgcgtggcgaccagtgccgggagctgatcaaggaacaggaagcgctgcacgggcgggtccgcgacgacttcaacgccctggcgcgcctgcaggccgaggccgccaccgatgcgccgccgatgctggctcgggacctgctgcagcagtccagcgccgatctgcagcgccgtgaccgcaaagcggcggtgctggacgacgaactgcaggcgctgctggacatcgagcagtcgttgcagcagcggtcgcaggaggccgttgccgcacgcgacgccgccggcggacgctggcaggccctgcaggaccaggtggacaccacgctggaagcggaacctacctacagggcgctgcaggacgacctgcagctggccgtggcgcgtgccgacacggtcgagcgcatggcttcctctgcccaatcggagcatgacgccaaggccggcgcctatcaggccgacccgatcttcatgtacctgcaccggcgcagctacggcagcacggcctaccgcggctggccactggtgcgcaccgtcgacggctggctggccgaactgtgcggctttgaccgtgcccgtcgcgagtacgccacgctggtcgagcttccgccctatctgcaggaacatgcccgacgcgcccgcgacgacgtggaggcggcccgccaaccggtacagcaggcccgcgatgccgccctcgcccgcgccggtggcgacccgctgcgccagcagctgcagacggcacagggcgcagtagcgcaggcgctgctggccgagcagctgcatcgtcagaccgtggatgccaagcaggcacagatcgacggcttccgcagttggaccgatgccgaaggcagcgccctgctcaccgcgctggcgcgcacgctgtcggccaagagcatggacgacctgtaccggcgcgtggccgccaccgcctccggcgaggacgatgccgtgctcgagcgcatccatcgcagtcgcctgcgcctgggcgagatcgatgggatggtaggcgagcaaacccgcgaaatggccgtgctgaaaaagcgcctggacagcctgcaggcggcgcggaggagctaccaggcggcagcagacatcgagcgccaggcctacgaggcgccgagctaccgggccgtcgcgccggccaccgtcgccgcatccttcttcagcaccaccagcagccgaagcaccacccgctcctctggcggcctgttcgacctgctttcgggcggttccagcagttccggctcgggttcgagctccagttcgagctccagctccagctccagctccagcggcagcagcttccacagcggcggtggtatcagcggcggcggtgacttcaagaccggcggcgggttctagcccggcaacggccgggtgcgccgcttcagccgcgcatccagcaaccccacgcccagcagcaccaggctggtcagccatccggcggccagcaggtgcatccagggcaacaccaggcccagcatcagtagtgcggcggcgcccagcaggtgcgagcgcggcgcgcgcccatagaccacgtgcttgtacagggcactgcccagcagatagatcagcgggcccgccaccatcaccgtggcgtacaccgtggtgacggccgccgccggatggtccatgaccagatcgttgcccaccgcggtggcgatgatgccggcgatcagcagggcatgcacgtaatggaaattggcgcccatccggcccgggtcttcggcgtgggtgatggcctctgtggcatcgcggctggagatgccgaagtacagccaccacatggcaatcgtgccagcgaaggtggccagcaccgccgagatcacctgcaggctccagtgctcgacgtcgcttagcacgcccccggtggccagcaacgtctcgcccagtgcgacgatgacgaacagctggcagcgttcggccaggtgaccgccctcgatggtccagtcgcgggtgtgcgaccggcccatgcccgggaacgcgaagccgaacatcggcgagatgtattcgcaggccgccgccatcgcccacagtgccagccgcaggtggccctcggccgccgcgccggccagccagaagcaggccgacacgctgacccaggccagcatgcggcggaagttcggcgccaacgtatggttgcggccgacttccagcagcacgaacgcggtgcgtccgacctgcatcgtggcgtacgccccggcgaagatccacgcacgatcggcgaacgcctcgggaatggacgaggacatcaacaacgccagcagcatggtggcgaacatcacgccccggatgcgcggcgcctccgggtcgaaccagttgctgacccagcacgcgtactgccagccgagccagaccgcgaaccacaacaccagggtctgcagcacgccggccaggtccaggtggtgcagcagatggtggctgagctgggtgaccgcaaacacgtagaccaggtcgaagaacagttcttcgtaggtcacgcgggcatgatggccatcgcggtggcgcaacgcgggcaggcgcagtcgggtactcatggaactccttcagcgcgccaggcgccagtacaggaaaccggcaagtagcgccggcacggcgaataccagcaacaggatcggcagctcctcgcgtaccgcgtagccggccttgctgacccctacccacatgttggccacggccaccagcagccaggtggcgatgaaggcgatcagtgccgtgggcagctgcgaggtgcccgtgctccagagatggccaaacagcacgaatacccccagcagcagtacgccacccagcatcaccatgagcacgtgcatggtccacctccttgagcctggtagcaggctagccccggccgattctgcgctccagcccgtggaggtggattcacaatccatggccagcgaacaatccctgggcaggctgcggcgcaccttattgcagccatgaattattcgcgaaacggtccgccccgcccgcgtgctagtttcatccgaccctgcccagacacctctccgccatgcgcctttgcctgacgacccttgccctgactgccacacttgcctttgatgtgactgccgccgacgcaccgctgccgcagctgcaggcctacaccgtggacgcctcgtggctgcagccgatggcaccgctgcagattgccgaccacacctggcagatcggcaccgaggacctgaccgcgctgctggtgcagaccgccgacggtgcggtactgctcgacggcggcatgccgcagatggccggtcacctgctggacaacatgaaggcacgcggggtggcagcacaggatctacggctgatcctgctcagccacgcacacgccgaccatgccgggccagtggcggagctgaagcgccgtaccggcgccagcgtagcggccaacgccgaatcggcggtgctgctggcgcgcggcggcagcaacgacctgcactttggcgacagcatcacctttccgccggccagcgccgaccgcatcatcatggatggcgaagcggtcaccgtaggcggcatcgcgttcaccgcgcacttcatgccggggcacaccccaggcagcaccgcctggacctggaccgatacccgcgatggccagccggtgcgcatcgcctacgccgacagcctgagtgcgccgggctaccagctgcagggcaacgcccgttatccccgcctggtcgaggactaccggcgcagcttcgctacggtgcgcgccctgccctgcgacctgctgctgacgccgcatccgggcgccagcaactggaactatgccgccggtgcagaggccggagccaacgccctgacctgcaaggcctacgcggatgcggccgagaagaagttcgacgcacagctggccaaggaaacagccacggcacgctgatactgtagagccgagcccatgctcggcttgccggccaaacacagccgagcataggctcagccctacacaagacgcctcgaaaggtgccggtcaggacgaccggcacccgccttccatcagccaccctgcccgtgctgggcaaacggctcggtgctgccgtcggtccgcaccagctcgacggtgtacgactgcacgtaaccatccggcatttccatgcccggcgaaccggccggcatgccgggcagcaccagcccgcgtgcggccgggcgttcggccagcaggcgcttgatgtcctcggccgggatgtggccttcgaccacataaccgccgatctcggcggtatggcaggaggccttgccgaccggcacgcccaggcggaccttgatcggattcatgtcatcggtatcgcgcacgtccacctggaagcccgcggccttcagatggtcgacccagataccgcaacagccacagctggcggtcttgtgcacgatggccaccggcagggccggatcgaccttggccgggctggcctggatcggtgccaccggagccttgctggcgaccggtgcggcggcggattcttcggcggcacgtgcacaggcggtggtggccagcacggtgcccagcagcaggccgagggagagagaacggttcattgagtgattcctttgctgaggcgggcaacgcggcccgccgcccgcgcatcgaaggcgcaggcagaggcgagaaagagccgaacagtcatggcaggcgcttgagcgcctgcaggacatcacacgatggggggacgcaacgggtccggcatcggcggcgatgcgcgttgctgggaacgggcagctacaggcgcctcacgccacggcgaggcgggcgttccactcaacgtggccagcatgccaaggcaggctggcgggcattcgcactcaccgctctggcaggccgcccgggccgcatcatcgcagcagccggctgccgccagcgcagccgcgtgcggtgcagcgcagtgatcctggttggccgacccgctgtacgaagacgagccaagcgccagcgccggtgcattcagcaccagggcaacgagcagcatccatcgcagcagcaggccaggcaggttcacccggcgatgatagccgatgcgcgtcacgcaatcgccgccgccatcgcccgcatccgcaccgggatcgacttcgctgcgggtgtgccgctgatccggtcgtagtagtccagcggcagcaacgggttcagttccgggtagtaaccggccagcgcgccgcgcggcatcgggtagtccagcaccgtcaggccctcgatgcggcgctgcacgccatcgccgctgatcgtctccaggctgaccagcgcttccttctccagcccgcgcgccagccggtcctcgatattcatgaacagcaccatgcgatcgttgtacacgccgcgatagcgatcgttgtagctgtagatggtggtgttgtactgatcatgcgagcgtaccgtggccaaccgcagcatgtccggatcgtgcaccggatcgtccacgtccaggccgggcatcaccaggatgttggccttgccattgggcgtgggccacacccggcggcgcggcggaatgtccagatggaaaccgtgtggctgctggatgcgctcgttgaagccggtgtagatctccggatacaccgcggcaatcagctcgcggatgggcgcgtagtcgtgcatgcagccggcccagtcaaccctgctgtccggcagcgtggccagtgccatccggcagacgatctctacctcgggcaacacctcggcactgaccggctccagtaccccgcgcgacgcggttacattcgacatcgcgtcttcgatggtgacgaactgctcgccggccggcgtaacgatgcgttccgagcgcgccaccaccggcaggatcagtgcatcgcggccatggaccaggtgcccgcggttgagcttggtggcaatgcccacggtgagctccaggccacgcattgcctcatacgcacgcggggtatcgggcacggcatggatgaagttgccacccaggccgatgaacaccttggcgctgccgtccagcatcgcctcgatggattcgaccacgtgatggccgtgctcacgcggcgggtcgaaaccgaacacctgctgcacgcggtccagataggccggcttgggcttctcgtcgatgccgacggtgcggtcgccctgcacattggaatgcccacggatcggtccgatgccggcgccgggcttgccgaagttgccacgcagcaacagcaggttggcgacctgctgcagcaggcgcgagccatactggtgctgggtcagccccatgccgtagcagatcacggtggccttggagcggatgtagatctccgcgcatcggcggatctgcgcctgcgaaatgccggacacctgcacgatctggtcccagtcctgcgccatcacgtcttcgcgcagcgcctccaggcccaccgtgtgttccgacaggaaatcatggtcgagcacgcgctcgccctgtgcctcacgctcgaacatcaccttcatcatgcccttgatcagggccaggtcgccgccgatgcggatatgcacgaactcgctggtgatctcggtcgaaccgaacgtggccatctgcaccacgtcctgcggctcggcgaagcggatcagcgcacgctcgggcatcggattgaccgccacgatcgggatgccgcgtttacgcgcctcgaccaggttgctcatcatccgcggtgaattggtaccggtgttctggccgatcacgaagatcgcctcggcatgctcgaaatcctgcagcacgatggtgcccttgcccaccccgatggccggcggcaggccacggctggtcggctcgtggcacatgttcgagcagtccgggaaattattggtgccgaactcgcgcacgaagatcgaatacaggaacgcggcttcattgggcgtgcggccggaggtgtagaactcggcctggtgcgggctgtccagcgcctgcaggtggcggccgatcagcgcgaaggcatcgtcccagctgcacggcacgtagtggtcggtggctgcgtcgtagcgcatcggctcggtcagccggccctgcatctccagccagtagtcggtctgcgccatcagctcggtcacggtgtaccgggcgaacagttcgcggccggcgcggaactgggtggcttcccaggccagtgccttcgcgccgttctcgcagaactccagcttcttgcgttcgtcggcatcggggaacgcgcagctggggcacttgaagccaccgggctggttcatcgccagcaatgccttcgaccccttgccgatcacactctgctgcagcagcaccttggccgtggcgccggcggcaccccagcctccggcgggctggttgtagggcttgtaacgcggcggtttctgctcggacatgttcgggaacctggcggaaggaacgcaacaacgaacggcacaacgcggcccggaggtgcattcagtggcacgaccagccgcacagtcaagcacggcccacggcgcttcgccagagggcacaggctgatttcagcacaacctgccatggcaacggttacagccgcgtctgcgcgcgaccactgcgctatcctcgaaaccgcaggcggtggcccgcccgcgtttctcccttgtccggacgcgctgcatgcctgattcgatcccgccgcacaccccgcctgccggcactgcccaacgcccgttgcagcgctggcgcggcggcacgcaacagcagcaggtcgacgtggtggccgaggaagtgccgatggcgctgcgctacaacgatgccgcctttgccgtgatgatggccacaccctgtgatctggaggacttcgcactcggattttcgctcagcgaaggcctgatcagcgcgccctcgcagctgctgtcgatcgatatccacccacagctggaaggcatcgagctgcagatgaccgtggacgaggctgcgcccggcgcaaacctcgaccccgacaagggacgcctgctgcccggccgtggtggctgtggcctgtgcggcacgcgccagctggaagaagtgctgcgcccactgccgcagatccgcgaacgccgcagctattccgccaccgccctgcagcgggcgttggccagcctggcgcagcaccagccgatgaatgcggcaagcggctcgatccatgccgcggcctgggccgacgccagtgggcgcatcggctgggtacgcgaggacgtcggccgccacaatgcactggacaagctgatcggcgccctgcaccacaacgaacacgccatcgaaggcggcctgctggtgatttccagccgggccagctacgagatggtgagcaaggcagtgcgcgccggcgccagcgtgctggcggcagtgtccgcgccgaccgcgctggcgatcgatctggcccgcagcgccggcctgtgcctggtcgggttcgcgcgggaaagcgggttcaatgtgtatacgcatccagagcggctgcaggcgcacgacggccacgcccgctgaggatggccgggagcactgcgtcccccggcccggtacgcctcagcgcagcgcgaccttcgggaagtccaccggcacgtcgaacgccacgttgacgtagttggtgaacaggttgagcgccacatgcgcgaggatctcgacgacctgctcatcatcgaagccggccgcgcgcagcgcctgcacgtcgccgtcggcgatctgcgcacgctgctcgaccaccttcaacgcgaagtcgagcgccgccgcagtggccgggtcgctggactggccgatctgcgcggcagccatctgctcaccgctggcgccggccttgcggcccaatgccgtgtgcgcggccaagcagtacgcgcaggcgttgcggttggcgatggccacggcgatctgctcgcccagcagcggcgacaggcgaccgccgcccagcgcgccgaacgaaccccacatgctctgcagggcagccggcgagttggccacggcgcggaacatggccggggtggcgccgaaggcagcgtggacctggcccagcagggcctggcggtcggcggtggtgttggcggcatcgatcagggggacacgggacatggtggatctccttgggaaagcgcccgggattggacgacccgctcatcctaggtagactccctggacgcaacatcctcaattcgccacatatgttgtccatacgtccatgagcgtgcgcaccgccacccctgcgccagatcgactctcctcgctgctggaacgcttccgggtgcaggcggcgctgttccacagtggcccgctgtgcgggcagcatgtcttcgagccgcagcccggtcgtgcgttcctgcacatcctgcgccagggtgagatggaagtccgtcatcctgggggcgatagcgcgctgccccgcttgaagatcgatacacccagcctcctgctgtatccgcagccgctgcaccatgtgttcttcaacgctccgctggacggcccggatttcacctgtgccacgctggatttcgatggtggcgcgcgcaatccgatcgtgcagtcgctgccaccggtgatggtggtgccgctggccgcgatcaccgaactggatgacaccctgcagctgctgttcgccgaagccgatcgccagcgctgcgggtcacggctgctgaccaaccgactgttcgaggtggcgctgatccagatcctgcgctgggtggtcgaccacccggatgcagccggcgtcagccacgggttgatgcgggggctgtccgatgcgcggctggcacgcacgctggtggcgatgcaccaggcaccgcaggacgaatggacgctgccgcgcatggccgcgaccgccggcatgtcgcgcagcgcgttcgcggccgtgttcaaggacgtgatgcaggcaacgccagccagctacctgctggactggcggctgagcctggcctgcgcgcagctgcgggccggcgtggcggtcaagcaggtggcgatcgaggtggggtttgccgataccgcatcgttgtcgaaggcgttccgcaagcggttgggggcttcgccgagggcgtggctggccgcgggcgccgcgcaggctgggtaaaggcgagggggcagagtcgaccgctggtcgactatcgcgcgacgcgcgggaggttcgttgtccgaccgaagggcagtcgactaacgatcgactctaccgatgcggcattttcgtgatctgaccgaagagcagccgaccagcggtcggctctaccacggacgatcgaagcggcatttccgtggcctgaccgaagagcagccgaccagcggtcggctctaccacgggcgatcgaagcggcatttccgtggcctgaccgaaggacagccgaccggcggtcggctctaccacgggcgatgtcggcgcgccggctgcccgctcaactggacgttccatcgggcttcgccagcagcccggcgatccgttcggccacctgggcgcgcacgctttcatccagctgcccctcgtacatcgcctcgtagatccacaggccgtcggcggccagccgtgccacgaaattgtcgagcgcggccgggtcgctctgcccggccgacggcggcaacggcgcccaacgccgtaccgccggcccccacgggcgctcatcggcgtccgggtcggccgattcgagcatgaacatcagctcggcacgggtagcgctctgcgccgagacgcgcacgaaggtctggtaacgctccagcgccgaggcttcgtctgcacgcttgcccagcagcgtttccatcgacgtctcccaggcccgcaccaggtgctcgtcgatgccgcgcagcagcgcctcgcgcgacgggaagtggtacagcaggccgccgcgggtcagcttggcctcggccgccaccgactcgaaggtcactgcgcgcacgccatcacgattgatcacgttgacggcggcgtcgaggatgcggtcgcgcttgctggttctcatcgcgtcattttacgcgatcggccgcaccctcgcggctgccgacgcgcccgcgcagcaggcgcgcgatgatcgacgcgcccagcgccagcaccaccgtgatcaccagcagcacgatctggtagccgcggtcatacgcggtcgtggccagtgcgaaccactcgccctgcccgctttcacgtgccacgtgcagcgcctgggtgaagccttcccgtgcaagcgcgggcatgtcggccgagaccggcaggaatgcgccatacatcgccgcgctcaagctgcccagcatcgccaccgccagcaggccgccgaactcgtaggacacctcttccaccgacgaggccatgcccgcacggtgcgccggtacgttgttgaggatggcggtggacgccaccgagatggccgaacccatgccgaagccggtgatcgccatgccggcgaccacccagccgaggccgtgcgggaagccgaatgccaccacgccgacacccagcgcacctgcggccaggccgccacagatcagcgggcgcaggcccacccggtgcaggatgctgccgcccagcagcgcactgggcaggctgcccagcgcggccaccgacaccagcaggcccgcctgcagcggagaaaagcccgccaccagctggaagcgctgggtagtgaccagctgcaggccggccatcgcaaacagggtgaacaccgccgacagcgtgccggccaggaacgccggattgcggaagatcgcgaagtccagcagcgggtgcggcagctgctgctggcggcgcgcgaacgccgcaccactgatggcggccagcagcagcgcgcctgcacccagcgcatacgacggcggcgtagcgatcagcgacttgatcgccagcaccaggccggacagtgcagccagagccagcagcgacgaaatcaggtcccacggtcgcgaggtgtcgcgctggccttccggtgccagcagcagcgtggccacgaacgcgaccaccaccaccggcacgttgatcaggaacaccgagccccaccagaaatgctgcagcagccagccaccgatgatcgggccgagtgccgcgccgacgatggccaccgaaccccagatcgcgatggcgatgttgcgttcgcgcgcttcgtggaagctcaggccgatcagcgccagcgtggccggcatcatcgcggccgcgccgaccgccagcaaggcgcgcgcggcaatcagcagccctgcggtgtcggcgaacgccgctgccaacgatgccacgccgaacaccaccaggccgatcaggaacatgcggcggtggccgatgcggtcgcccagcgtacccgcgcccagcagcaggccggccatcaccagcggataggcgttgatgatccacagcgcctggccggcactggccgagagttcttcggtcagcgtgggcagggcggtgtagagcacggagttgtcgagcgtgaccagcagcaggccggcggcgacggtgaacaacagtgcccagcgacgggcacgcgacagggccggagcaccggccaagggctgggacaaagccatgggagaacctgatgggagtggattacgatcataactataccggatgtcctgtatagttatgaaggcggcgacagcggttcagattggggcccgggcaatgttcatgttgccgtgcccctcatgccgggtcttggctggtgtccgggatcatcaccggcagtcttccggcagcgcagcaatcgccgctaccaccgccgcctgcatgccctgccccacggccatgtccagctccccgcccgttgccccgtgctggcgccgcagctcatcctcgcacaggccgcgcacctgcgcgcgggcattcgcgcgcaggctgctgcaccgccagtcggtgccacccagcggcagcaccgaatacaccacgctgttgcaggcgttgccagcgcgctgctgcaacgaccgtccaccaaaatcccggggttcactgctgcgctgcgggtcgaagtagctgtccgggaatgtgcgcgcgtactgttcgatgtccaacgccatgctgcgcccagcggccaacggcatctgcagcggctgcccgcaccgcgtcgcatcggcgcgatgctggatgtactggtagatcggccggtccagcgatggatcctgctgggtcaccgcgctgactcccgccagcaccggcagcgatgcacgattggccatgcgcgccagcagccccgcctgcgctggctggcagcggtcgcgcactgttgccgcaagcaggaacagcacgtcgttgcggaacgcgtggtcgtcacccaaacgctgttcgatgcgctggctggcgtcggacgccggtgctggaaacgcgaccaccggcggcgcggtgggtgcgcgctgccgctgccaccacaccagcagcacgactgcgctcaccagcaccccggcagccaagatccagcgcatgcgcatcagtcgtggatcgccgtcagcgtggccgctgcggcatcgtaggacgcgctggcaatgtccgcatcgaagcgcttcacctgcaggcggccggccaaccggtacgggtcccaaagatcgcccagcgcgatcggcgtggccagggtcacatggatgatctggttcggtggcggcggcggcacgtggatgcacgcaccatagaacggcacgaacagcagttcatcaaccaggccggcatcgttggtgccgagcggtaccacgtagccatccagatccaccgcgcgaccgtcgacagcgtcgaccacgcgcgaagagccgaactgcttggcgcggtcggggctggaatggtcgatttcctgccccggtggcgtgcccgagccggtgtcgtcgatcagcccgcccaccccgtccatgccattgcgtgacaagccgatctgcgggggcgggcgctgataggtcacttcgtccggccgcagcgcgtcccagcggtcgataggcgtttcgggcgcggcggagggcaacggcttgtcgcgcggcgtgaccaccacggcatcaccgcccggtgacgtgcagcctgccaaccagacgcatccaagcagcaacacagcgctacggttcatagggcctcagctgggcatcgcgcatggtgtaggcggaaccggccagatcatcatccagccgctcggcacgcagggtgccggccaggaagaacggcgagtacatgtccggcatggcgatcgggcgcggcagcaccacgtgcacgatctggttcggtggcggcggtggtacgtggatgcaggcgccgtagtacggcacgaacaggaattcggtcaggcgcccgtcctgcgcagtggccagcggcaccacgtagccgggcaggcgcaccggacgctgcagcaccgtatccacggtacggaacgtgccgaactgcggcatgcgccggttgccgttgtgctccacctccgggccctctccgcgctccagcgcggccagctcgtccttgggcatcatctgcaaccagtccagttcctgctccgccgcatccgcagcgccagcgtggtcgacaaccggcgaaggtggcaacgcctgcacaccggtatccaccggccgctcgcaggctgccagcgccagcaccatcggcaatgacagcatccagcgcatgctcagcctcccggcgacagaccatcggccaaggtgcgccggtaggccagcaacgccggcaccagcccggccaccgcgctgatcgccaacacacccgccacccaggccagctcgcggccatccggccagacatgggtgatggacaggccgaacgtggccagggcccagccgcgtccggccatgctggcggccaccagcagccccaacgccagcacgcaggccacggcactggttgccaccgcttccactaccagcaggccggcgatgtaacccggccgcgcgccggtcgcacgcaggatcgccatctcgcgccgccgctgctgcagcgtcgagaccagcaacgccaccagcgagaccatgcccagcaacaccaccatcgcgctgatcagctgcagtgcgcgctcggccgtgcccagcgactgccacagctgctgcagcgtcaccccgggcaggatcgccagcatcgcctcttcgggatactcgttgatcctgcgctgcaccgaaaaggtggcgatgcgcgagttaaggccgagcatgaaagcggtgatgctggtcggggtcagatcgaggtggcgcgcctgctcggcactgacgctctggctgcgcagctgcacacccgagcgccagtccacgtggatggcctcgatcgccggcagcgagaccagcagcgacgaatccaccggcgtgccgctgcgctgcaggatgccggagacccggaacggcttgtcggcatgcgtggccagcgtgaccgcgccggtgccgtgcgccagcacgatctcgtcgccgaggccgaccttctgcgcgcgtgccacctccgcgccgatcaccgcgtcatacagatcatcaaagggccgcccctgtgcaaaggcaagcgcatgaccggaaccataacgatagtgttcaaagtagccgccagtggtacccactacccggtagccgcgccaggaatcgcccagcgacagcggcaccgcccacttcacctgcggcattgcggacagcgcctggtaggactgccaggacacgttgttggtcgggtcaccgatatggaacaccgcgtacagcagcaggttcaccggtcccgaacgcgcaccgacaatcaggtcggtgcccgatacggtgctggcgaaaccttcgtgcgcctgcgtgcgtacgcgttcgacacccagcaacagcaccacgctgagggtgatgaccagcacggtcaggcccacgctcaacgcgcggctgcgcaggctggcccatgcaagctcaagcatggtcggcacctgcctggttgatctccgacaagacgatcgtgcggtcgaacaacggctgcaggctgtcgtcatggctgaccaccagcaccgtggtgccggccgcctggcactgcgcggacatcagctgcaggaaggcggtcgccgcctcccggtcgagcgccgaggtcggctcatcagccagcagcagcgccgggcggccgatcagcgcgcgtgccgccgccacgcgttgttgctggccgacgctgagcgtgccggcgcggcgctgcatcagcccggggtccagctgcagggcctgcagcagtcgcgcgatctcggcattcaacggcccgctgatgcgcgcactgcgcaggcgcgagaagcgcaggcccagtgcgatgttgtcgcgcacgctgagaaacggcagcaggttgaactgctggaagatcacgcccaggtggtcggcgcggaagcggtcccgcgcggcaccacacatcgcctgcagcgcgtggccggccacctcgatgcggcccttgccgggcagcagcacgcccgccagcaggcccagcagcgtgctcttgccaccgccactgattccgcgcagcagcacgctgctgccctgctcgatccatagccgcggcacgtccagcaccagccgccggccatagccgaactgcacgccatccagcacgatcaccggtcgcatgctcacggtgccagcaccacgcgcagattgtccgcagtcaacacgctgcggttctggccatgggcggtggcgctgttgacgatcacttcgtgcaggcccgggaatactgcgggcaggcgcacgacgatggcccgcaacccggcaggcttggtgcactggtaccgcagcgttgcgctgaaccctgcgtggcgatgctgaccgggcggcggcgcggcagccatcgcaccgaagccctcggccctggcatcgttcgcgataaggcggcagcccgcggcggtgggcaaggtgacccagctgccgccctgcagcagcgcagtcgcacgcgccagcgcggcctgctcggctgcattggccggcggccgctcgaaatcaaggatgccgatgccgggcgcctgcagggcgaattccagcgtctgctggtcaagcgcaagatcaacggtggcctggccgtgtacgtgcgcaccgagctggcggacatcatgggcctgtgcagcgctggcagccagcagcaggaaaagagcagcagaacgcttcatgggagaggctccgattgttactatgtaacattatggaccacatccccacgacgcctgcaagggccctggcccagccgccagcttcggcacgctggcacccccgcttcgatctagccggggcctggctgtccctggcctgcgccgcccattgcatcgccctgcccctgctgttggccttcgtgccggcagcgatgatggcgctgcgctcgttccagcaccccggccatggagcgatgacggtgctgctgatgatgtcgcgccgggaatgggtgtttgcgctgctggcctcgtcgctggccttggcgagcaccttggccggggttcaccggcatgggcgctggcgacctgcaaggctggcctgcgtcggcgccctcctgctgttgccggcctcgctatacctgccgctgaaggaatcactgctctggcatggcgtggcgacagctggtggtggcgtgctgctggcatgcgcgcacatcggcaaccggcgcgcgctgcacaaccgccggtagtgccggccgctggccggcagctgcgggatcccggcagccggccagcggccggctctacccctcgatgcatgggccacgcatcaggtgatacacagctggtagtgccggccgctggccggcagccccagagacccggcagccggccagcggccggctctacccatccatgcatgggccacgcatcaggtgatacacagccggtagtgccggccgctggccggcagccccagagacccggcagccggccatcggccggcgctaccccgccttattcgtcaaacggacgctggccgagcgtctgcgtcacgtggtcgacgaaacaggtgatgcgcgcggccagcgcggtgttgcggtagtacaccgcgttgatcggctggcgcacctcctgcgtctgcttggcgaacaactgcaccaggcggccgtcacgccggtcctggcgggtcaggaagtcggacaggcaggcgatgcccagcccggtcaccgccatctgccgcagtgtctcgccactggacgaagcaatcgccggctcaatcacgaaagggccgccatcggcatcctgcagcggccactcgttcaacgaactgggctgggtgaagccaagcaggtcgtgctcgcgcagctgctccacccgcgtgggcgcgccacgccggcgcaggtactcggggctggccaccacgcggatgcggctgtggccgatgggccgcgcatgcagggtggaatcgcgcagcacgccaatgcggaacgccacgtcggtgcgcttctcgatcaggtcggtgatgccttcattggaattcagctccagctccacctgcgggtggcgctcgcggaagccctccagcaacggcacgatgacgtgcagcatgaacggcgtggcggcgtctacgcgcaggcgcccgaccggctgcagccgccgcgcggccatctgttcctcggcctcgtccaccgtggccaggatcgtgcgcgcgtactccaggaatgcggctccctcctcggtcagctccagccgccgcgtggtccgccgcagcagcgtggtctgcagcttgtcctccagccgcgccaaggtgcggctggtggcggagatggtcagctccagctcttcggccgcggcagtgatcgaaccgctgtcgaccacggccacgaaggccttcagctcatccagggtggttttcattttttacctcggcgcaaaagcatttcccgtatacacggcttaatcaacaaatgtaaagcgcccacacttcgccctgtcccgagcccaccggctctcaacgaagtccccggagtccatcatgagcgttccttcctttggcgtcggcaccttccgcctgaccggccagaccgtcatcgattcggtgcgcaacgccctcgacgtcggctaccgtgcggtcgataccgcgcagatctacggcaacgaagccgacgtcggccaggccatcgccgaatccggcgtcccgcgcgacgagctgttcctgaccaccaagatctgggtggacaactacgccgccgacaagctgatcccgagcctgcgcgacagcctggccaagctgcgcaccgggtacgtcgacctgctgctgatccattggccggcgccgggcaatggcgttgaactgcgcgagtacatgaccgcgctggccgaagccaaatcgctgggcctgacccgtcagatcggcgtgtccaacttcaacatcgaactgacccggcaggccatcgaggtggtcggcgctggcgagatcgccaccaaccagatcgaactgagcccctacctgcagaacccggcactgactgccttcctgcaggaacaaggcatcaccgtcacctcctacatgaccctggcctacggcaaggtgctgaaggacccggtgctggccgccatcgccgacaagcaccaggccaccgtcgcccaggtcgcgctggcgtgggcgctgcagcggggttactcggtcatcccgtcctcgaccaagcgcgagaacctggcgagcaacctgcttgcccaggacctgcagctggatgccgatgacatggccgcgatcgccgcgcttgaccgcaatggccgcgaagtcgatccgccgggcctggccccggcctgggactgaggagcctcgccatgggcagtgcgttgacgcggctgcaggccggtggtttcagcatcggcatcgaagcaccgctggacaatgactggacgccgctgggcgaacaggcacgacacgccgcgcgacgcctgcccggcgaaccggacctgcagcgccatgcggaactggcacggttggccgaccgcctcggcttccgtgcgctgtgggtacgcgacgtgccggtgtacgacccggccttcggcgatgccgcacaggtgttcgaggtgttcagttacctcggctacctggccggcatcaccgagcacatcctgctgggtaccggcgcggtggtgctgccgatccgcgagccgttgctgaccctgaagtcggcacgcagcgtgcagcggctgagcggtgaccgcctgctgctgggcgtggccagtggcgaccgcccggtggagtacccgctgttcggccgcgacttcgacagccgtggcagccgcttccgcgagcacatcgcactgctgcgcgaaggcgctgccgcgcacctgccgcagggcctggacgtgctgcccgcggatggcccggccctgccgctgttcgtggccggcctggcccagcagcaaccggcgtggatcggccagcacatggatggctgcctggcctacccgggcacgccgcaggaccatgtacaacgcgtggcggcctggcgcgccgtggccggcaacaagccctatgccagcttcatccacctggacctggtggccgatgccgatgctcctctgcagcgctggcgcttcggcctgcgcggcggccgcaacgccctgctggccgaactgcacgccatgcgggcggccggtgtcgaccacatcggcctgcagttccgccgcaacgaacggccgttggccgaaaccttccacgaaatcgccgagtacgtgctgccgcacttcccggcccacgccggcgccgctgtgccgcatgccccgcttgccgcccccgcgacggcctgacaattaccggagctttgccatgaagatgaagaccctggctgcgctagcgctggccaccctgccgctgtccttccaggccaccgccgaggactggtacccctctgcctacggcgccaacgacgagattggcgcggccaacctgctgaccgccgacgtggtcaagcacgcggtctcgctggtcaggaccggcaagacctatccgctggcggtgccggcggacaagaacctgcccgcgttccgccaccgcagcttccgcctgtacaacgtgcaggtcggccagcaggctggcaagtcgctgggccccaacaagttcaccttcaacgatgaactggtgaacgcctggaccggcgttggcacccagctcaacggcatcggccatatcggcatcgacaacgtctactacaacgacaacaaggccgccgacttcgtcaccgtggacggggtgcgcaagcttggcgtcgagaaggtgccgccgatggtcacccgtggcgtcgtgctggacatgaccacgtactacggcaaggcgatcgtgcccggcggcaccgagttcaccgtggccgacatccaggccgtgctgaagaaccaggggctgcgcctgcgcaagggcgacgtggtgctgttcaacaccggctggctggaactgatcggcaaggacgacaaacagttcctggaagtggaaccgggtatcggcatggaggcggcgaagtggctggccgaccagggcatcgtcgccttcggtggcgacacctgggcctcggaggtctacccgaacccgaacggtgccgaggagttcccgatcaaccagtacatgctggccaagcgtggcatctacaacctggagctgatcgacagccgtgccctggtgcgcgacaaggcctgggaattcctgttcgtgctcggccagccgctctacgtcggttcgacccaggtcaacatcaacccggtggcaatccgatgaacaccgccgctgaccttcccgtgttcgccggccgccgcttccgcgtcagctatgacggcctggccgccgacaatgtctacagcgccgatggccgccacgtgcagtacgccatcgtctctggcgcctatgccggtgcgcagggcgaagccgcctgtgagtggcagcggatcagcgacggggtctatgccatttcgtggcaggaatccgatggcgctacggtcgtgcatgtcgatgacttcgcgggcgggcattcgctggcctggttcaccgccaccgatggcagtttccatcgcatgcaagggccgctggcagcgctgtgatgccggccagcggccggcggacggaacattacagatcggtaatgcaggggtcagggcagcgaaaggcgctgccctccaccctgtgggccatgtcttccacaggtgtcccacgcatggcccgtcccctgctccgctccaccgcccttgttgtcctcgtctccggcctcgcggttgcgccgctggccctggcccatcccagcctggtgcgctcgacgccggccgccgacgcgaccgtggcgccggccagccagatcgagctgcagttcagcgagaaggtgatgccgcgtgccacccgcgtcgaactgagcatggaccatggccgcatgaagatggccatgcccaccactgcgcaggagctctccgaagatggccacaccctgcgcgcacgcttcgccaagcccttgccggcaggcagctacgcactgcagtggcgcgcggtgggccaggacagccacccgatcactggcacgtaccgtttcaccgtgaaataaggctgccatcgtggccgagctctcgccgtatgcgctgcggctggcactgtacctggtgctgatgctgctgttcgggcggatgctgttcgtccgtccggggctgccgcgcggcgtctcgctggcgctcgccctgatcgcgttggccgtggtggtcaccgatgccatcacccgcttgaccggtgtgctcggcatcgcgccggccgacatcgaccctgcaacggcgcactggttcctcaccggtacgccggtgggtaaagccggcctgctgcgtaccgcggcggtgctggcgatgctgcccctgctggcattcgccacgccgctgccgggcctgcgccgcgtggccctgctcgctttgtctgccacggcgttggccagcctgtcctggaacggccacgccgctgcgggcgatgggttcggcggcaccttgcggctgctggccggcatcgtgcacctgctggccgccggtgcctgggtcggcgcgatcgccgccatcctgcagttggcgctgcgtccacagggcctgcgcctgcgcgagcgcacctacgagttgtggcgggccgcgcacagcttcgccctgccgggcacggtcatcgtcgccctgctggcaatgaccggcacctatacctatgtcgatctcggcggttccgtgcagaccctgaccggtaccgcgcatgggcgctggctgctgctcaagctggccctggtggtcggcatgctggggttggcggcgctgcatcgctggcgattggtaccggccttggccacctccatccacgacggctggcaaccgcggccgctgcgttccctgcgccacagcctggcctgcgagtcggtgctggccgtgctggtgctggcctgcgtggcggtgcttggtacgctggacccgttggcgtgagcctgcgcagccagcccacgtgcaagctgcgatgatgggcgcatcatgaaactgctgatcgtcgaagacgaacccaagaccggcaactacctgcgccagggcctgatcgaagccggctacgtggtcgatctcgcctgcaacggcgtcgacgggctgcacctggccggcagcggcgagtaccaactgatcattctcgatgtgatgctgcccggcctggatggctggaacgtgctgtcgcggttgcgcgacggagggtggcagacaccggtgctgttcctgaccgcgcgcagcagcatcgccgaccgcgtgcagggcctggaactgggcgccgatgactacctggccaagccgttcgccttcgccgagctgctggcgcgggtgcgcaccctgctgcgtcgcggccaggcacaaccgcaggccgagcgcatcatcatcgccgacctggtggtggataccctgcgccgccgggtcgaacgcggcggccagcgcatcgccctcagccagaaggaatacaccctgctggagctgctggcgcgtcgccagggcgaagtgctgccacgctcgctgatcgcctcgcaggtgtgggacatgaacttcgacagcgacaccaacgtgatcgacgtggcgatccgccgcctgcgcgcgaagatcgacgatgacttcgatgccaagctgatcgtcaccgtgcgcggcatgggctatgtgctggaggcgccggacgacggtgccgtgcacagcggatgagcctgcgtcgttccatcgcggtacggctgacactgctgttcgccatcgtggccacgctggtgctggccgcattgggcgtggcgatctatgtcagcgcccgccatgatcttgttgcccaggacttcatcgaactggaaaacaaggtcgcgttgatccgcgacctcgctgacaatgggcctgccgccgcgcgcggaccgcggttggcagaggcgctcggccatcatccggatatcgccttccacattgttgatgggagcggaaccgtactgttctccactgcgccggcactgctgcgcgagcatgcacgcagccagcccatcgacgccgcgccacggcggcacgactggatcctcaccgatggtcgctgcatgcatgccctgcacctgcgccagacgctggccgacggcagccagctggtgaccctgctggccattgatgacaaccgtcacgccgacttcctggagcgcttccgccacctgctggcaatcgccatcatcggcgccgcggtggccagcagcctgctcggcggctacgtggtgcggcgcacgctgcggccgctgcgcacgctggccgatgaggcaaggcagatcaccgctggccggctgcagcgccgcctgagcgcgcgcagtgcaccgaccgaactggagcagctggcgcagaccctcaacggcatgctggcacgcctgcagcaggacttcgcgcggctgaccgaattctccggtgatctcgcccacgagctgcgcacgcccatcaccaatatgctcacccaggtgcaggtggtgctggcgcacccgcgcagcaacgaggcctaccgcgagacgctggcgtcgtgtgccgaggaactgcagcagctggcacagaccgtgggcgacctgctgtacctggcgcaggccgaagcaccgggcgcgctgccttcgcgcgagccggtggcgctggatggggtggtggattcgctgctcgagttctacgagctgctggccgaggaccggcagttgaccctgcgccgcgaaggtgtggcgagcgtggaaggcaaccgcctgatgctgcaccgggcgattgccaacctgctgtccaacgcgttgaagcacgccgctgccggcagcgaggtgcgggtacggctggccgaggccgatggcgtgtgcagggtcagcgtgcacaacgtcggcacgccgatttccgccgaagcgctgccgcgcctgttcgatcggttctaccgcggcgagcgtggccgacacgaaggtgcggggctgggcctggcgatcacccgcgcgattgcacaggcgcatggcggcagcgtgagtgttgcgtccgatgacaccggcaccgtgttcgagctggtgctgccgggcgccgcagcccggtagtgccggccgccggccggcccccccccccggggtacatcaagcgcattgcggttgccggccagcggccggcactaccctctgcggtcggacggcttcgcgtgccgctccggcagtgccggccgctggccggcaaccgcggcctgctcgaacaccccggccacccagtcgatgaacacccgcaagcgtggggacggcgtgcggttgcgcgggtagaccaggctcaacgggcttggggtcggcggcgcgtccggcaacagctccaccagctgcccgcgcgcgatatacgggtccatccggtagcgcggagcctggatgatgcccaggcccgccagcgcggcgccgaggaacgcatccgcaccggacacacgcacccgcaccggcagcggcacgtagcgcacctgcccgccctgctggaactccagcggaatcagctggccggtggcgctggagcgatagcccaccatttcatggccgcccagcagggactcgatgctgcctggcacgcccttggcctgcaggtagcccggcgcggccaccgtgacctcgcgcagcatcgccaaccggcgcgccgccagatcgctgtcggccagcgtccccacccgcagcgccgcatccacgccttcgcgcagcagatcgacatagcggtcgccttcgctgacctccagttcgatctccgggtagcgctgcaggaactccggcaggtggggaaacagcaggtgccggcccagcgtgccatgcacctcaatgcgcaaggggccgcgcggcggcgcgtcacggaaggcggcctcggcgtcgtccatgtcggcgatcaggcgtagacaacggccatagaaggcctcgccttccagcgtcggcaccaccagccgcgtggtccggtgcagcaggcgcacgcccagccgctgttccagcgccttgatcgcgtcggtcaccgtggcccgcggcaggcccaggtcctcggaggcccgggtgaagctgcggcgctcgacgatacggacgaaggcgcgcatggccgtgaagcggtccattgttcggctatccggatgatgttggcggattatgcaggattatccgaaagcgcgatttcgcgaagatggcgctgcgccacttcggcgtgtccccgtggaagtcaccatgaccctctcccccgcccgctctgtcgccctggtcaccggcggatcccgtggcatcggtgccgccatctcgcgtcggctcgccgccaatggccacgcggtcgcgatcaactatgcgggccgccgcgacgacgccgaagccttggcggccgaactgaacgccgccggcgcgcaggccatcgcgctgcaggccgatgtgtccgatccgcaggcggtgcgccagctgttcgacgccatcgaagcccgtttcggcggcatcgacgtggtggtcaacagcgccggggtgctgcagctggcaccactggccgataccgacgacgccctgttcgagcgggtgatcggcatcaacctcaggggcgccttcaacgtgctgcgcgaaagcgcgcgacgggtgcgcgacggtggccggctgatcaccctgtccaccagcgtggtcggcatccggctggagaactacagcgtgtatgcggccagcaaggcggcggtggagacgatgggcgcaatcctcagcaaggagctgcgcgggcgcaacatcaccgtgaacgccgtggcgcccggaccgaccgccaccgatctgttcctggatggaaaatcgcccgagctgatcgagcggctggcgaagatgaaccccctggagcggctgggcatgccggaggacatcgccggcgcggtggggttcctggcaggtgccgatggcggatggatcaacggccaggtgctgcgcgccaacggcggaatggtgtagatcgcacaggtggcatccacgcatggcgcgacgcccttgtagagccgagcccatgctcggctgctcttcgcgcaaaggccagaagcagccgagcgtgggctcggctctacaggtaggtcaggcgatgcgcgcctcgcggcggcgatgcacccagtagtacatcgccggtgcggtggggttcctggcaggtgccgatggcggatggatcaacggccaggtactgcgcgccaacggcggaatggtgtagatcgcacaggtggcatccacgcatggcgcgacgcccttgtagagccgagcccatgctcggctgctcttcgcgcaaaggccagaagcagccgagcgtgggctcggctctacaggtaggtcaggcgatgcgcgcctcgcggcggcgatgcacccagtagtacagcgtcggcaacaccagcagggtcagcagcatcgccgacagcaggccaccgatcaccaccaccgccagcggcttctgggtctcggcaccgatcgcgtgcgaggtggccatcggcagcaggccgaacatcgccaatagtgcggtcatcagcaccgtgcgcaggcgctgcagcgaaccctgcaccaccgactgcagcaggtccatgccctgctcgcgcaactgggcgaagcggctgagcatcaccacgccgttcagcaccgcttgcccgaacaatgcaatgaagccgattgccgccgacaccgacagcggaatgccggtcagccaaagggccaggatgccgccgatcatcgccagtggcacgttggccaggatcagcgcggcgctgctgatgtccttgaaggcatcgaacagcagcacgaagatgatcagcaccgacagcggaatcacccagcccagccgcttcatcgcacgctgctggttctcgaactcgccggaccactccagccgatagccttccggcagctgtacgctggcatccacgcgcttgcgcatgtcagccaccacgctgcccatgtcgcggccggcgatgaagatgctcaccgccttcacccgctgtgcgttctcgcgcgagatgttgatcgcgccgctggccatgcgaaagtcggccacgtcggacagcgtcaccgtgtggccatcgccgatgccaaccggcaccgtacgcagccgctgcaggtcacgatcggcatcgtccaggcgcagggtgatggggaatctgcggtcaccctcccacagctcgccgacctggcgcccgcccagtgcggtctcgatcacttcgtcgacgtcgcgtacgttcaggccatagcgcgcggcgcggtcgcggtcgatctcgatctgcagctgcggcaatgacccgtcgcggtcgatgaaggcgctctccacgccctccacgccgcggacctggccgaggatcgcctgcgcctgctggttcaacacgtccagatccgagccgctgaccttgatcaccacctggcccttgatctgcgagatgctctccaggatgttgtcgcgcaccggctgcgaaatcgagaactcggggcccggaatgcgctgctccagcgtgcgctgcagatcgctcaccagctgtcgcttgtccacgcctttcggccattccttctccggcttcaacgccaccagcgcctcgatctggttggcgcccttggcatcggagccgtcttccgggcgtcccagcttggccaccaccgtcgatacctgcgggaacgtgccgaccagctcacggatgcgccgcgactgctgctgcgcttcgcccaggctggtgctcgggtcgagcgtggccgtcagccagatcgatccttcgtccagctcgggcaggaactccgaacccagccgcgtgcccaatgccagcgtgccgaccagcagcgcaaccgcggtcagcactaccgcacgcgggcgggccagtgcgcgctccaggaccggccggtaccagccggtcaggcggtccatcagcggattgccgtcgcgcatgcggtcgcgccgcagccaccagtagcagaacaacggcaccacggtcagcgccaggatcagcgcgccgatcaatgccgaggtcaccgagtacgccatcggcgcgaacatgcggccttcctggcgctgcagggtgaagatcgggatgtgcgcggcgatgatgatcagcatcgagaagaacgtcggccgccccacttccgacgctgccgaaagaatggtcgagaaccgtgtcttacggtcggccgcaggtggcagcttcgacaatcgcgagacgatgtgctcggtcacgatcaccgcgccatcgatgatgatgccgaagtccatcgcacccaacgacagcaggttggccggcacgccccacagatgcaggccaaggaaggtcgacagcagcgcaagcggcatcatcgccgccacgatcagcgcggcacgggcgttgtacaggaacagccacagcaccaggaacaccagcaccgcgccttccagcaggttgctgaagacggttttcagcgtggtcgagaccagccacgagcggtcgtagaacggctcgatgctgaccccggccggcagctggttcgcttcgatctcggcgatgcgcgcatgcagggcgtcgagcacgtcggacgggttctcgcccttgcgcatcagcaccatgccgaacaccgcatcgtcgttgtcatcctggccgaccaggccctgccggggcaggccggtatcggcgatgccagccaggtcgcgcaccaggatcggcgtgccactgcgctgcgccacgaccacgttgccgatgtcggccggcgagcgcatcagaccgacgccgcggatcaggaactgctgctggccacgttccacgtagccgccgcctgcgttcgagctgcccttctccagcgcctcggcgaactcacccaggctgatgccgcggtcacgcagcttgtccaggtccggcttgacctggaacgtacgcgcgaagccgccgaaactgatcacatcggctacgcccggcacggtgcgcaggctgcgctccatcgtccattcctgcacggtgcgcagctgggtcggcgtcaggtgcgggcctttcagcacgtaccggtagatctcgcccaccgccgagctcatcgcctccagctccggcgtcaccccttcgggcagctccacgccctgcaggcgttccagcacctgctggcgcgcgaagtaatcgtcggccttgtcgtcgaaggtcaggatgaccatcgacaggccgaattgcgtatgcgagaacacccgcaccgaatgcgggatgccggacagtgccacttccagcggcatcgtcacctcgcgctccacctcctccgcggcccggcccgggtgcagcgataccaccgtcacctgggtgtcggacacatccggaaaggcttccaccggcagcacgcggaacgcggcaatgccagcgccgatgaacagcagcagcgccagcatcaccatcagcggctggcgcaggcaataggcaatcaggcgatcgatcatggcgcggcatgccccgtcccggtgctggcggctgcgggcgcactgtcgaccagctgctgcagcaacaggcccccttcgaccaccaccctggcgccctgggccaggccctcgcgcacccacaggcggccatcgcccagttcctcggcacgcacggcgcggcgcgcgaagcggcccttggcctcctccacgaacaccacctgcttgccgtcgatgagcagtaccgcagcatcgggcagcgagacaccgcccccggccggcactgccacctgcgcacgcacgtactggcccgccttgaagccgcgcgcacggttgtccagttcggcgcgcgcctgcaccacgcggcgttcgctgtcgacgaagtcatccacgtgctgcagggtcgcctgctgcggctgcccatcggcgccgggcacgctcacctgcatgcccgccttcaggcgtccggccaggctctccggtacatccagcagcaaccacaggcggtcaggatcgccaatcatcgccagcggctgttcgctgtcggggctgactgccatgcccgggctcatccgccgctccaccagcacgccatcaatgggtgcgcgcagcggcagccgttggtcgacgtgctggccgttgccatacgccctggcgaaggcggtcgcgcgcgcgtgatcggcctggctgccggcgaagctggcctcggcctcgtccagttcacggcccgacgccacccctgccgcgtgcagttcgcgggtgcggtccagttcccggcgtgccagctgcagctcggcacggccacgcacgccctccgcctgcgcctggccgaactcgggcgaggtgatccaggcgatcacctggccggccttcaccttctgccccggttgtgcctcgatgcgcgccacctgccccgccagcggggtgcgcagcgcgctggagcgggtctcgtcccagaccacccggcccggcagctgcaggctggcgctggcaccggcggtcaccagctcgctgcgcagcacatccagctggcggctgccggccggaaacaggatctggccggcactgacctgcggcgcatcctcggtatacgacgccggttcgcgaccgcagccgcccagcagggccagcgccagcagggccggcagcatggcatgtcgcgcccgcgggcgatgggcgacggtggacttcatcgggactctccttcagcaacggatgtggccgcttcccagcgcgccaaggcaatggcatggtcggcacgcgcatcaatcagcgcggcctcgaactcgcgccagctgcggcgcgcgtcgagcagatcggtcaggctggcggcgccacggcgataggccagttcgatgccctccaccgccttgcgcgcagcgtcggactgcagcccctcgtagtcgctgcggcgctgcgcggcggactgcacgctggcctgcagctggtccagttcagcgtgtgcttcgcgctgcagcagctgcagttccagcgcggcgctgtcccggtcggcctcggcacgctggatcgcgccgcgtgcgcgcgacgggccgcccagcggaatggtcaacgacacgccccaggtgacaccgctgatatcggtgggctcgcgctcggcctccacacccagctggatgtcgcggtggcgctcgctacgtgccagggccacgccagcgtcggcggcggccaggcgcgagcgtgccgcgcgcacatcggcacgctgctgcggatcgaacgcgcgcagcttggccacgctgctggcatccggccaggggtcatcggcactgaggtcgcggctgtcatcgctgccgagcagcaggcccagcgtatgccgcgcgtcacgcagatccagggccgcctcgcgcgccgcatcggccaccgccagatggtccaccgccatccgcgcgcgatccaccggcgccatcgccccggtggccacctgcttgtcggccgccgccatctgttcggccgaactctggcggttggcctcggcaatctgcgcccgctcctgcgcgcccttcaggccgaaataggcttcatgcagtgccacctgctgccggcgccgggtatcgagcatgtccagcccggccacttccagcagcgcgtccgcctggctgatgcgcaatgcgcgcttgccgccgcgctcccaggtccagcccaggcccagcgtgctgtccacccgcttgtcctgccagcgccccgggccgatgccgtgcttcgggctgatcttgctgctgccgatcgacagctcggccgctggccgcaacgcagcggtcagcgcatcgccctgcaccccacgcagttccaatgccgccgcgcgcaggtccgggttgtgcgcttccattgcacgctgtgcatcctgcaaggacagcgccgaagtcgaaggcgcgcacgaaagggcggccagcagggccgcaagacgacgggagaaattcatgcacgtcacggtaaggtgacgcacttgcgccaaacttgccccaaccttgcacgaagcttgcaatgcgaatcctgctgatcgaagacgacgccgccctggccgatggactgatccgcgccctgcagggcgccggccatctgtgcgaccacctttcgcgcgggctgcacgcgccggctgcactggccagcgcgccgtatgacgtgatggtgctcgatctttcattgcccgacgtcgatggcctcgacctgctctcgcgcctgcgcaacgacggcgtcacactgccggtgctgatcctcacggcgcgcgatggcgtggaggaccgcatcctcggccttgaccgcggtggcgacgactatctcgccaagccatttgcactcggtgagctggaagcccgcctgcgtgcgctgtcgcgtcgccgcagcgacgcaccggcgcacaagcggttgggccgtttgtgcttcgacagcatccgcaatgaagtgcaggtggaaggccagcgcatcgaactgaccgcgcgcgagctgtcgctggtcgaggcactgatgcagcatcctggccgcaccgtcaccaagcagcgcctgttcgacgcgctgtacagctgggatcacgaggccaacctgtcagtgatcgaagtgcatgtcagccgcctgcgccgcaagctggaacaggcgcgcgccggcgtcggcatccgcatgctgcgtggcctgggctatcggctggaagccggtggtgactgagcgtgtgcacagcctgcgtggcctgctgctgcgccgcctgtggctgcccctgctggtgctgctgctgtgcagcgcgatcggttcattcgcgttggcccgcttctatgccggccaggtctatgaccgctggttgctggactcggcgatgtcgttgtccgagctggtgaaggtgcaggacgggcgtgcctcgatcgagatcacgcccgcggtgtcgcgcatgttcacctgggataccgctgacgaagtgcatggcgaagtggtcgacgctgcgggcgggcgcctgtatggggacctgcccgaagcgctgccccgccccgcgatcgctgccggcagcgacgatgccgtctactacgacgcgcgcctgcgtgggcagccggtgcgcatggtcgaggtcgtggtcagcgctgggccgggccatgatatccgcctgcgcgtggccgagacgctgcgcaagcggcaccggctggagcgcaagctgctgctggccagcatcccgttccaggccgcgatcctggcgctggccgcgtggctggcctggtccggtaccggcgcggctgcacgccatgccaaccaggtggcgcggcggctggccagcccgcgtccggacccgctggcgccactggagcccgcgcaggaagccccacgcgaactgtggccggcggtcgaagcctacaacgcactgctgcaacggctggacgcgatgcaggccgcgcaacggcgcttcgtcagcaatgcggcgcaccagctgcgcacgccgctggcggcaatgcaggtggagctggagagctcactccgccaacaggatccgcaggcccagcagctggcgctgtccggcacgctggccgggctggcacggctgcagcacctggtcaaccagctgctgatgctcagccgctcggaagatccacagggcagcgcactgccgctgcagccgctggatctggccgcgttggcacggggcgtggtcgagcgctacgccgaccgtgcgttggtggcgggcgtggacctgggttacgacggacccgacgacggcgtgaaggtacagggtgatccgcagttgctgcgcgaggcgctgggcaacctgctcgacaacgcgctgcgctacggcgccgtgcccggtgtgatcaccctgggactacagcgggatgccgagggcgtgcaggtgtgggtggacgatgacggtacaggtatcgccgaagccgagcgcgcgcgcgtcacggaacggttctaccgggccagcagcgagggagatggctgcgggctggggctggcgatcgtggccgagatcgcgcagcggcatggcgccatattgatgatcgaaacggcgccgctcggtggcgcccgcgtcgggttgcgtttccgttgacctttgtcgaattgcccttgtagagccgagcccatgctcggctcaggcaccgtgccaaaagcagccgagcatgggctcggctctacaggttccaggtcacccgtgaagcgtgccggccaaggtcggcacctaccacgtgcgcatcaccggctcatcgaatacggcgcctgcgcgtcctgccccggccagtccttgttcggctcggcctgcatgctgaagcgcagttcgccgccagccaggatctcgtcatggcgcaggaaggtgcgctgcagcggcttgccgttgaggctcacgcggcccacataggtgtgtttgtcatccaggccctcggccacgatggtgaacgtcttgccgttcggaagacgcatcgcggtcttcggcaggaacggacggcccaggatgtactcgcccgagcccggcgccaccgggtagaagcccagcgcggtgaacacataccaggccgacatctggccaacgtcatcattgccggccaggccatcggggcggtcggcatactgggtgtccatgatctgcttcaaccgcgcctgggtgcgccatggctggcccgcgtacgaatagaggtaggccacgtggtggctgggctcgttgccgtgcgcataccagccgatcaggccggtgatgtcttccatgtgctcgaagatcgatggatccaccttggcgttgaacacctcgtccagacgcgcgagcagcttgtcgctgccaccgtgggctgccgccaggccggcaacgtcctgcggcacgtaccacgagtactgccaggcgttgccctcggtgtagtcggtgccgtagccgctggcgctggggtcgaacggcgtacggaagctgccatcgcgcttgcgcgcgcgcatgaagccggtgtccttgtcgaacgcgttgcgccagttacccgcgcgtttgtcgaaggtggccgcgatatcggccttgcccatcgcctgcgccatgcgtgcgatggtccagtcatcaaaggcgtactccagcgtcttgctggccgcttcgccttcctcgtcgatcggcacatagcccagctcacggtactgcgcgataccgtcatacgggccgtagttggcggtctcgaccatcgccttcaatgccttgtcggcgtcgaagccacgaatgcccttcacgtaggcatcggcgatcaccggcacggcgtggtagccgatcatgcaccagtcttccaggccatggaacgaccacaccggcagcatgccgtacggactgtgctcatggtgggccagcatcgaattgacgaagtcgctgttgcgcttctccggctgcaccagcgtcagcagcgggtgcagcgcgcggtaggtgtcccacagcgagaacgtcgaatagtgcgtgaagccgtcggccttgtgcaccgcgttgtccgaaccgcggtactggccatcggcgtccatgaacagcgtcggccccagcatcgtgtggtacagcgcggtataggcactgcgccgcgcatgctcgggggcatcgatatcgagtaccgacagcgcctgcgtccagtcctgcttcgcctgcgcacgcacccgatcgaagtcgaagtcggccacttccgcgtcgaggttggcgatggcaccggcctcactgaccggcgagatggctaccttcaccaccagcggtgcgtcgagcttgccgaatgcgaacgtgccgaccagctggcgaccctcgatctgtgcgcgctgcgccgggtccttctcgcccggcggcgggaagcccttgtagacgatgtcctgctcggtgttatgcagttcatggccagccagcgagcgcgaaaagcgcatcgcgaagaacagctggcggcccggcgcccagccgcgcgtctcgcggaagccggtcaccgtgccatcggcgcgcacccgcacccgcgaccacagcaccttgcccgggtagtcgtacatgctggtacgcatgtccagcagcaccttggcgtcggcacctttggggaaggcatagcggtgcacgcccacgcgcgcactggtggtcagctcggcacgcaccttgtagtcgtccagggtgaccgcgtagtagcccggctcggccttctcgtcagcgtggcggaaccgtgaggcgtaaccgctgcgcggcttctccggatcgccgcgctccagcccggggttgccggtgaacggcatcagcaggatgtcgcccaggtccgaatgcccggtgccggaaaaatgcgtgtgcgagaaaccgacgatgctgctgtcgtcgtaacggtagcccgccgcccagccataggccttttcgcgcggctggatgcgcgtgtccgggctgagctggaccatgccgaacggcaccgtcgcccccgggtaggtatggccttccccgccggtaccgatgaacgggtcgaccgagccataggcgcgttcggcggcggatttcgacggagccgccagcaccgccccggaggcaagcatggcggtcgcgacgaaagcgatcaggagacgacggtccagcgtgggcatcggcatttggatcgattcaggtggtagtcggatcctagcaccggccctgccctgtcgcatgctgcagtgcggccgccggaaccggcacgatgctttgcacgtaattgcatggccgcacgacgaatcacctcatagccttccggtctcccgcgtcccgatcggtgccgatacggcaatggatgtccagacatgcacttctgaaagaccgcgccttccgaacgggacaaagcgagacaaaccatcaattggtgcgcagcgcctcgatctgcccaggattgcgccgcagcggacatcccgctgccgggattggaacccccgaatgaaactgaagatctgcctgtcatgactatggcgggcgctgcgtgtggccgtctggccatcggagttcttcttcagtctctccgggttccaagcacgcatcgcccgccacccttgcggtggccctcgcacccaaggagttcccgcatgaaacacacgcgtccgctcagcccggccatggagtcgctcttccagcgcatcgaacacgccctcaacagtgcagaaggcatggccatcctcatcggtgaacagtacggccccgagccgaagccgcccgcaccgatgggctacaacgccagagagatcgccaatgcgatggtcatgctgagccagcatggccggtcgttgttgcagaagctgcgtgcggaagcggaaaaggtgacctatcactagcccgccctgcagccgagcccgctcggcgccgtgcgcaccgcacgcagtgattgctgccctcaatctggcaatgcgccctgcaaggtgacgaggtcggcgctgtcgaccggcctcaccacgcgcgccacttcctggccgtcatgcagcagcaccacggtgggccacagttttaccttgaacgcacgccccagcggctttcccttgccatcctcgatcttccaatgcacaagatcgtgggcgtccacaaacgcctggagtgcgggctgcgcggcctggcaatggccacaccagggtgcaccgaactccagcagctgccagcccgcctgagcttccacgtccgcgcccgcaggctccgccgccgggtagtcacgcatgaacggcatgccggttacgccgccagcgctttctggatatccgccagcggggcgttggtcaggtccttggcgatatcgcccagcagacgcgcctggacctccttgtgcagcagcgggcggatacggcccagcgtggtcgggtctgccaccagcaccaggtgtgcatagcggttgttgagcgcatcttcgttcaactgctccgccacctgcttggcgaacgtcgcctcgttgagctgcgcaatggacatgtccttcggcaccgcgccggccgggccctgaccagagacgccctgctcgctgatgtcctgcaggcgcagctcaccttcctgcttcaacgccagctgatgttcgctgccgacgttggtgaacacgcgggccgaaccgccatcggcgacgatgatcaacgtgccttcgggaatgcgacgggtcatgcgatgctccttctcgattgcgtccagcgctaccgtagacagcgtcgcgtgagcgctgcggccagagttcgttcaacacttgtcattgcatgccgcgcggatgaacaggcgcgatggaacacagcgtgcagatcagtccgcttcgctgcatgctcacgccgatgccgctatgatgaacgaatgatcgacacgacccactacgtgacgggcgcacctgttacgtgggaagcactgccgaccggcgcttcgctggccacgatggctcccgccctgccgttccaccgcctcgcgctggatcctggcggatgacgcccgcaggccctcggcctgcactccccacgctgctgtgaccgccggccgctgattgcgcgaccgctgtgatcccgttgctgcgtttccgccattgcggcggtgctttgccgtgcgcgtggcgtcgtgcctgcacacactccccggcccccacgccactcaccgatgcccctgcgccacctgcgcctgcatcgccgtttccgatttccgggacctacctcaccgctcatttcccctcttctgcctacaagggagcccccatgcaggacacccccgatgcacatgcccatttcggctggttcaaacgccgccgccacctgaaggtcgatgagatcaccgtcgtcgacaagcccatgctcaagcgcgccgtcggcgcggccgcactcggcaatgccatggagtggttcgacttcggtgtctacggctatctggccgtcaccatcgggcaggtgttcttcccctccagcaaccccaccgcgcaggtgatcgctgcgttcgccaccttcaccgtggcgttcctggtgcggccactgggcggcctggtattcggccccctgggggatcgctacggccgccagaaagtgctggcgttcaccatgatcctgatggcgctgggcacgtttgccatcggcctgattcccgcctacgagcgcatcggcatctgggcgccggtgctgttgctgctggcgcgcgtggtgcagggcttctccaccggcggcgaatacgggggcgcggccaccttcatcgccgagtattccaccgaccgcaaccgcggcctgatgggcagttggctggagttcggcacgctgggcggctacatcgccggcgccggcaccgtcaccgcgctgcacatgctgttgagcagcgagcagatgctggactggggctggcgcattccgttcctggtggccggcccgctgggcctgctcggcctgtacatgcgcatgaagctggaggaaaccccggcgttccgcgccttcgccgaggaagccgagaagcgtgagcacgagcggccggggctgggcgcgctgttccaggtgcatggccgccagctgctggtgtgcatgggcctggtgctggtgttcaacgtgaccgattacatgctgctgacctacatgcccagctacctcagcgtcacgatgggctatgccgagagcaagggcctgctgctgatcatcatcgtgatgctggtgatgatgccgctgaacatcgtcggcgggttgttcagtgacaggctgggccggcgcccgatgatcatcggtgcgtgcatcgcgctgctggtgctggccattccgtgcctgctgctggtcggtagcggcaacgacgggctgatcttcctcggcctgatgctgctggggctggcgctggtgtgcttcaccagctcgatgccgtccacgctgccggcgctgttctacaccccggtgcgctacagcgcgctgtcgatcgccttcaatgtgtcggtgtcgctgttcggtggcaccacgccgctggtgaccgcgtggctggtggagcgtaccggcgacccgctggtgccggcctattacctgatgggcgcggcggtgatcggcctggtaaccatgctgttcgtgaaggaaaccgccggcctgccgctgcgcggttcaccgccagcggttggcagcgaacgggaagcggctgcgctgttgaagagcaatgtgcctgtgacggtggacccgaccttgccgccgctgccggacgttgccgagcccgagcaggcgaagccggcgttgtagagccgagcccgcgctcggctgacttccaggggatcagccgagcatgggttcgactccgcaccccgtgcggcatcaatcacccggggtgtccaattccatcgcgcgcatcacgatgggcttggcccagcccggcgtgtgcaacaggtcggccactgcgaccgggtaatgcagctggcctgcagccatggccaataccggcagcggcaccacgcagccgtcggcatcggccggcgcgctgttgtcgtagacatgcagctcggccaggtgcggcagcagctccagcaggttcgcgcgcgccgaatcgaaacgcgcgtggatcttctccaccggaatatcgtggccaccggcggccacccgcgcggccacacgggcgacgtgcagcccgacatcggccagcccacagaaccagatcgccacctggtgccgctcgcaggcctcacgcagcagacgcggaatggtgttgccaccgagcgtggtctcgaaggcgaagtcggtgccatcggccatggcctggcgcaggcggcgggtgccttcctgccaggcctcggcattggcgtccggcagcggccagccggcgtcgaccaggcggcgggtgaacgagtccgggttgaaccagctcagcccttcggcgtccagccaggtgcccagcagcgaactcttgccggcgccattgacaccggccaacgccaggatgcgtcccatcgatcagagcggacggccaagggtgaccttgcggccgcgccggatcggctggcccagcaccttgcccagcccttccccgcgctgcagcccggccagggtctggtcgaactcgctgcgcaggcgctgcagctcctcgctgcgctcaccggcatcaccgccggcggccttggccagcagttcctggtaggtgcggatgtccacgatcaccgcttccgggtggttgtggttggtgatgaccagcgcctgcttttcgcgcacggtgcgcatcaggctcggccagccccgggtcttcaccgacgaggccggggccttctcgaggccaggcagatccagcggcagggtcatggcacggctccaggcggggtggatgagcgacactatacccaatttggccaaattggggataaatccccttttaccgcaggggcccggtgtccggagcgtcggtctgcagcaggctgtcgcgttcgcgcagcgggaagcggatccacgcatccagcccctgtgggccaaagtgcagctcgccgctgccagccagctcgtagggcacgcgctgctcgatcagcgcccggcccaggccgcgctggcgtggcatttcccagccctccacgtcggcatggcgctcgcaccagtgcaggcccagccacggttcggcgtcctgcacctgcagatgccaggacacctcgatccgccccgccgcgcgcgcggccgcgccatagcgcagcgcgttgctcgccagctcatggatggccaacgacagcacctcggccgctttcggtggcagcagcacgtcctcaccgtgcagctcgcacaggcccgtgcccggcatctgcgccgacacttcctcttcgatcatcccgcgcaggcagaccccggcattgccgccgcgggtcagcaggctctgcgtgcgcgccagcgacatcaaccgcccgcacagccgctcggcgtactcgtccacgctggccacggtgctgcgcgtccgccaggcaagggcatggatggtggacatgatgttgcggacccggtgctgcagttcggccagcagcaccgcctggcgctcggtggcgcgcttgaggtcgtcgatatccaccgcaatggcgaacaccccggtcacctcgccgtctgcatcgcgcagcggcgcagcggcgacgcgtgtccagcgggcgcgcccgtcgtcatggatgaactggaactccaggccagggaccaccgtctccccccgcagggcgcgggcgatggcgaaatcatggggctcgatgcgcgagccgtcggggtgccatccctgccagcggtagtggttgggacgatcagtggacggcaccttgccggtgggcagataggtccgcatccggtcgttggacagttgcagtcggccttcggcatcgacaatgcagacgcccaccggcagcaccttgaatgccagcgccaggcgccggtcgctctcacggcgcttctgctcctcgcgctcgcgggccgcctgcgcgacatgcgcggcggtcgtttcgaacatggtgacaagcacaccgttgatgcgcccttcctcaccgcggatggggctgtaggtgatggtgaaccagacatcctccagccgcccccgccgcgccagcggatagagcttgtcctcgtaggtgatggtctcgccctgccacacccgctggtagatcgggccgttgatgtgccagacctcaggccagcactcgcgggtgggctggccaagcccgcccggatgcttgtcggcgaggatctcggcatagccatcgttgtagagctgcaccagctgctcgccccacagcacgaccatcgggaagccgtgggccagcatcaggtcgacagtggcgcgcaggtgcggcggccatcgctcgatcgcacccagtggcgtgcctgaccagtcgtggcgggcaatacgggcggccatgccgtcatggcgcgcatgcgcctgcagcggcggcggcatgcccgccgggcgctcaatggccgggagaccctcgatgcggcgtgacatgccgcgcaatcaggcgatgcccgcagcagcctgcgggcctgccaccagccgtgccagctgctgcaccagtgcctcgatgtgatagggcttggtacagcggggcgcgccagcgaagcggctgggcagattgtcatcgtagccggaggtcaacatgaacggcgtgccggcgtccgccaagcggtcggccaaggggtagaccagttcaccccccaggttgatgtccagcagggcgacatcgatggggttctcatcgaccagacgccccagcgcctgcaggtcaccggccggtcccaccacctgcgcgcccttcagttccagatagtccaccaggaacatcgcgatggcgaattcatcttccgccaccagcacccgcagccctttcaggccctctggcttgttgcccgcttccagcacgacccgcgctcctcgatacacgcggcgcacctctgccgcaacgcctgcaggatgcgcgaaacgggctacaagggcgcgtgatgatcgatgaagatcgccgccacggcccgttcacccaggcattgcagcggcgcgttcagaacgcacgctcccatttcaggctgagcaggctgcggtcgtggctgtacagccagccgacgttgctgtcgatgcgggcgtagcgcaggcccaggctgggcaccagcccggccaccgccagccgctcgctgcgcacgatggcgatcaggttctgttcgtcgtcctgcctgcgcgcctccagcaatggactccaggcgtcgtagtcgcggcggcgcagcgacacgaacaccgtggccgtggtgccgctccactgccgcgccgcgcccagccgcaagccgcgctggcggtagccgttggccgggtcggcagcgctgctgccggtgacatccagcccggcgaagaccgtccagcgcggactgagcgcgcggaaccaggtggcatacaccgataccagctcgccgtcataattgctggccaggccctgctggcgataccgctggcgcttccagtcggcctccagcttgagcaggctgcgtgcatccagggcgtactgccattcgccgtgcacgccactgccgccctgcagcgcacggttgcccaggccctggacgtcatagctgggggcaagcagcacggtctaccgcgcactgcgccagctgtaacctgcctgcacattggcattgagctcgttgtaggcacggtgcccgcgccatgcctgaccgaaggcgagaccgcgcacgtacagcccatgatgcccgtcgaggacccagcgccgttccaggctggcgtcgtagtcgaggccccctgcgcgctgggcgtcgggcagtttccgttcgatgatgcaggcgtcgcctacgccgaacaggcaggtgcggctggccgagctgcggttgatgttgtcactccatgcggggccggcggacagcgcgcctttccagcgctggcgcgcctgcagggcacccaggtacccgtccacgcgcgcgcggacgccggccgtggccggatcatcagcattgatgcctgcagcgatggccgtgaacagcgcgaccgcatcgcgatcacgctggtcttccgcatagacacgtgccagctcgagacgggccggcaggaactccggctgcgccgccagcagcgcttcgtactccttcgccgcgcgacgatggtcgccggccacgcgggccaacgccccctgcgcgtaatggcgcagcagcgggtcatgccccggcagttcgatgtactcctcgaggaacgccgcggcggcccgccattgctgatgctgcagtgacaggtagagggcctggccgagatcgtcaacggtgcgctccacgcgcagcgtcctgccgtcgatggtgatggtcggccgctccgactcggcctgttgcaggcgctgccggtcctgctgctggtggcgcagttcgctgccctgttcaagcacgcggcgcagatcgtcctgctgggcgcgcacatcagcggcagccaacagcagtacgacaaggaaggtggaatggcgcatggtcgatccgtggtggtgcatgcagcggccgaagcagggactggcggatcgcggcttgtccctgccctgccccgtcaggggcgtggcgatcagttcttgctgccgccgaaggcggtgtcgtactggctgttgccggcgaacgtggcgataccggcgagcgtggccgcattggcgccgaagaactggccctggctgttgccggtgaccgagccgttggccacggcggtgccggcgaaggatgcatcggcgctgttgatgttggcgctgatcgccagggtctggccaccaccggtcaggccgccggtcagcttgccagtgccgaagttcgccgcgaaggtaccgctgagcaggttgctgccattgaaccggttcaggccggccaccgcgtaggtggcggtaccgctgggcagggtggtgccggcgcggtcaccagcgaagtacacctggcggttgttgaagccacctgcggcgccgtccttggaccattcaccgaaccacacatcgccactgcccaccttgacgaagttgaagtggcccatgccggaatggctacccggcgtaccggtgatcggcatggccagggtacgcacggtaacgccgttgacggtggtcggggccgagtaggccgccagcccctggaagtcgaccggcttgccattggagacggtgccgacgccgatgccggccttgcctgcgctgtgcgggccgccgttgacttcggaggcaccgaccttgacgtacagctgcgaatcggtggccgggctggccgcaccgacgatgtcggcggcctgcgcggcaccggccagggcgaaggtggcggccatggccagtacggaacgggagatcatcttcatggaactactccttgggttgagggaacaacgggtacaacaacgaggcaggtcatcagaagcgcgaagtgacaccgagcttcagcgtgcgccccggcgccggcagcgtggagcgcgtggccgggtcgacgtagtagcggttgccgaggttggtgccgaccagctcgacgctggtgtggtcattgaagcgccagcgcgcgtaggcatcgacggtggtgatgtttccccaggtgaacggcacgttctgccagatcaggccaccgctgccggcgtacaggcgatcacggtaggcctgcaggtccgggttctggtggcgccggtaatgcacgatgcggctgcccagctccaggcgctcatcgaacagccgggtgcccagcgacaggttcaccgacaaccggggaatggcctgggtcagcaggtagccactgacgaagccgtcctgcacgcagttgggcaccttgccggccagcgcatcgagctgcaccgccatgctttcgtcgcagaccttgttttccagcgtacgggtgatgcccaggtcggtgaagaagcgccggttgtcgaaccgcgcctgcaactccaggccgcggatgcgctgcttgtccaggttgtcgaacaggaagttgccgtcgcgctcgatcacgttgcgggtcttgtgcacgtagtaggccagcttcacgtcggcatcggcggtgttgccgaacagcgccgacaggttgtgcacgtagcccacttcgtagttgtaggcgtgttcgggcttgagcgggtacagcgggttcaggctgctggagaacgcgatggtgctctcgaacatgctggggaaacgcaccgcctcgctgtaacgcacataggcgcgcgcattgggcgagaaatgcgcggtggccgagaaggtcggcagccaggcatggtcgcgcctgcgctcgttgcgcccggccaccgtctgcggccgcccgttctggatgctgcacaggatctgcgcgccctgcaccggcaacagcccgggaatggccgccacctgaccattcaggcacgggttgctggcacggctgtagttgccgtccgcatccggcagccacggaatgctgtgctccaccgcaaccggcgtctcatacctgctgagcaggcccttgagcagatcatcaacgatgaagcccatgccgatgctgtcccagaacgcgcgctgcgcctcgatggcgtcgatctcgccctgcaggctggccgggcgctcaggcagttcgttgacccggtagcgggcctccttggggaacacagaggtggtcatcagttccgggtgttcctgcaggaaatcatcgaaggcccaatagcgcgcgtagcgcacgccggcgctcagggagaggaaatccaccggccgccagtccagcaccagatagccctcgccttcctggcggcgcccggcgcgcgggtacatgcgccagccatcgctgacgccaaagtacgggtccgccgagcgcagtttctcgaactgccagttgccgcccaccgtcaggtccagggtggaatgcaacgcgaagcggttgctcagggtcaggccggtgcggtcgttgcgggcattggccagcgcggtattgcgcaggatcgggctgctgccggggttccagtcggggttgctggcaaaattggggaagccgccagcggtgtaggtatcgctggtggtttcggtgcgccacaggttggcacgcaggtccagccagcggctgccggcaggctgccagtggtattccaggttccaggcatcggcatcgacgcggctgagcggccactggatgcgaccgtagtcgggcgcggacaggatgcgcgagggcatgatctcgccgtagtgggagagcgtacgccgccaggtggcgcgcagctgctggtcatcgttgatctgccaggtcgccttcagcagccacgattcctgctcgctggaggtgttgggcacctcgtcgccgggcttgaagtagcgcgccagcgtggtgatgtagtccaggcccttgtactcgaactgctcgcgcgggtcctggtcgtagtacgccgtgccctgggtgccggagaagtagttgccgcgcttgcgccaggcatacgcggccatcaggtccacgtgttcgccgcgcaggcccagcgccagccgccaggcctggtcctcgccggcgaacacattggcttccgaaccgcgcgacttcaccggcaccagcagcgtgctgtcggcatacggtgccgagggcgagccctgcgggaacccgggcaccgtgcggtagtcctcgccggtatgcagccgcggcaggcgtggcgccaccgcattgctgctgccttcgatcttcagctccccgccgaagcgctcacccgcttccacgatgtcatcgacgtcgatagtcttgatcaccagcgcgccaccgatcccgctgtgcacatcgcgcaccagccccggccccttggtgacctggatgccacctatcaggttgggatcgatgtagttgcggttgctgacgccgttgtagccgcgccagaccgtaagtgcctgctcgccgccgtcgatgctgaccggcacccgccccggcccctggatgccgcggatgttgatgtccagcgcgccactgttgcgcgcatcgccgctgaacacaccgaccagatccttgaccacgtcggccggattggagccgcggtagcgctccacccggtcgcgccccgaatacgccgtggccatgtccagcgcgaacacatcatcgtagccgcgccgatcgcgggcctcgcccccttccgactgcaggcgaccggccacgtccagtgtctcggtcacccgcaccccttccccttcacccgcctccgctacggcacgcaggctccaggtgccgtccatgccacgctgcgcgcgcacgccgctgccacgcagcagcagctgcagggcctgcatctggctgtactcgccgctcaccgcgctggagcgacggccttccaccaggtcactgcggaacaccacctgcacatcggcctggcggccaaaggcacgcacggcgtcggccaggggctgttccggaatggcgtactggcgcagcggcgcgacgaccgccggttgcgcctgcccggccggcacccaggccaactgcagcaatgcggtggaaacagccagggccagagcggtggcgcgacgatgacaggcggatgccgtggacggcatggacaggaactcctcaagcggggcgggaccacggacacgtccggtgcccggtggtgtgtctggcttgagaagaaacgctgtttcgctctggctatacctctatagacagcgggctgcgacgactgcccacggttttttcatgttttttttcatgcgaccggttcgtccatgttccgcgggtgcttcaccacagcagcaacgcaccaccgggcaagcgctgcacgcgcagtcccgcctgcgcggccacggcgacgatggccgtgtccggttgctgcaggtggaacaggccactgacccgtatgcgtgcgccctgcccgcccagtacccagaccggggcacgacggtagcgcgccaggtcggcgatggcctgcgcggccggccgatcatcgatcactacctcgccacgccgccacggcgccatgctctccggatcttccagctgcaccggctgcagccagtgcccgtcacggaacacgcgtgcctgtccggcatgcaggcgctgcacgctgccatcgcccgggcgcacatcgaccacacccgcgctgacctgggtggtgaccgtggtatccagcatcgacacgctgaaggcagtgccgatgtcacggaccaggccgcccgctgcctcgacctggaacgggcgagcctcgtgcgctacctggaaccaggcctggccgcgcagcaggcgcaggtggcgctgccggtcatcgaacgaaagtgccagcgcggtgccggcatcgagtaccgccgtgctgccatcggccagctgcaccactcgtggcgcatcgctgctgcgcacatcactgcgcgccagcagcaacgcatgcggagcggccgcgaccatcagcaccacggccgcagccgatgccagcagccacggcaggcgacggcgcggtgcgatcggacgcagcccctggcggtcggcggtcagctcgggcagcgcggccagcacctcgggcccggcagcgtccaaccgctgccagaaggcctgctgctggcgccaggccagcgcatggcgcggatcggactgcagccagcgctgcagggtgcgttgctggcgttccggcaacgggcctgcactgcaccgtatcacccagcgcaacgcctgcctggcctgacgcggcgagggttcggacgtggtcatggttgtggcctgccgcaccgcgaatgggtgcgctttcctgttgtgacaacggcgggcacgatctgcccacggcaatcgccgctcatcggcccattccccgctgctgttgctggatcagcagcgctgcgcgcagcacatgcttgccgaccaggctcttggagatccccaggcgcgcggcaatctcgcgttcgctcaggcccaggtagcggttgagcacgaagcactcgcgtacctgggccggcagggccaggatggtctgggtgatctcgcgcagctgcgcctggtccagcgcctgcgcctcgccgtcgtggcctgcctcggccatgccggtggcgtactcggccatcgcgcgccgctcgcgggcgtcggcctggctgcggttgagcgcgtggtggtaggccatccggtacagataaccgcgcggctccaggatcggtggatcgccgggcacgctgctggccttcaggtagaggttctgcagggtgtcctcggtgctggccgggtcgaggtagcgcgcgacgaagcgggacaacgcacggcgctcgcggatcagcagctcgaccagcgccagggcattgggagacataggtgccaaggccggaccggggaatgatgggcgtgatggcgacggtccggacgtggattgtgggctgcggggccgcaggcggcaagccgcgccacgaaagcatcatcgacgcatggcgtggatggaggatctacggttcctccagcgcctcgaagcgttcggcgaggtagtcgatcagcgcacgcaccgcaggcaacaggccgcgtcgcgacgggaacaccgcgtgcacgatgccgtgcttgggcacccactccggcagtaccggcaccagcgcgccactggccagctcgtcgctgatcatcatccgcggcagcatcagcaggcccaccccggccaccgcggcggtgcgcaacgcgatcatgtcatcgctgaccagccgcgggcgatggtgcacgctggccagcacatcgcccggcccggtgtattcccaggcatgctgctggctgggcgatgccagatccacggtcggcatcatcgccaggtcggccggcacctgcggcgtgcccagccgctgcagcagcgccgggctggcactggtgcaccagacccggcgcgccagcacgcgtaccaccaggtcactgtcctccagcggcggcggccgcacgcggatcgccacgtccacaccctcgcccaccacatcgacgcgccggttggtggcgtccagctgcaccgtcacctgcgggtgcagggccaggaaatcggccagcatcgtgccaatgcgcgcgtgcaggatcgcgatcgggcacgccaggcggattgtgccgcgcggctcggcacgtgacatcgcaatggcttcctcggccgcttcggcttcgaccagcatggccttgcagtggcggtagtagtcctggccgacctcggtgaccgagaaacgccgggtcgaacgctggatcaggcgcacgcccaaccgttcctccagcagcgcgatgcgccggctcagtttcgacttcggcatcgccagcgcccggccggcctgcgagaagccgccatgctcgaccaccatggcgaagtagaacaggtcgttgaggtcacaacggcggatatctgcgatgaacacggggcgatctcctgcggccacggcctgcagacattgttcaccagataggactatgacggcaaatactggcgtctaccggccttattgtcacggcgatatcgtcttcgcaacgaagaacagcggccggcagccccggccaggagatcgccatgaagcgtgtcaccggtacctacagcgccccccgcccgcactgggtgggcgacggattccccgcccgctcgatgttttcctacaacacccacggccagcacctcagcccgttcctgctgctggattacgccggcccgtacaccttcgcccccagcaatacgccgcgtggcgtcggccagcatccgcatcgcggattcgagaccgtcaccatcgtctatgagggtgaggtcgcccaccgcgattcgaccggggccggcggcaccatcggcccgggtgacgtgcagtggatgacggctgcctccggcatcctccacgaggaattccacacgccggaattcagcaggcgcggcggcacgctggacatggtccagctgtgggtgaacctgccggcgcgcgacaagatgggcgcaccgggctaccagaccctgctcgacgcagagattccctcggtggatctgcccgatggcgccggccgcgtgcgggtcatcgccggccgcttccacggtcatgccggcccggcgcgcacccacacgccgatggatgtctgggacatccgcctgcagcagggccaccacaccgacctgccggtggccgagggccgcacgctggcgcttgtggtgctgaagggcacggtgcggatcaacggcggccagccggtcggcgaagcgcagctggtcaccttcgaccgcagcggcgaggacgtgttcgtcgacgccgacagcgacgccaccgtactgctgctcagcggtgagccgatcgacgagccggtggtgggctatggcccgttcgtgatgaacagccaggccgagatcgcgcaggcggtcaacgatttcaacagcggccgcttcggccagatcgcgcactgatcgtttcaagcggcgggcgatggcccgccgcaacctccgggccatcgcccgctttttccaggagactgaccatgagtacccccgccaacttcaacggtgcccgcccggtgatcgatccggacaacgccgcgatgctgctgatcgaccatcagagcggcctgttccagaccatcggtgacatgccgttcacccgcgtgcgcgcccacgccaccgcgctggccaggatggccacgcttgcaaagatgccggtgatcaccactgcctctgttccgcagggcccgaacggcccgctgatcccggagatccacgacgcagccccgcatgcccggtacgtggcgcgcaagggcgagatcaacgcctgggacaacccggaattcgttgccgcagtgaaggccaccggccgcaggcagctgatcattgccggcaccatcaccagcgtgtgcatggccttcccgtccattgccgccgttgccgatggctatcaggtgttcgcggtcatcgatgcctcgggcacctattcgaagatggccgaggagatcaccctggcccgggtggtgcaggccggcgtggtgccgatggacaccgccgcggtggcctcggagatccagcgcagctggaaccgcgatgatgcccagcagtgggccgaggtctacacgaagatcttcccgaactaccagctgctgatcgaaagctacctgaaggcgcaggacgtgcagaagaaccacgagccgctggattcgcagcgcagctgagcacgcaggacggtacagtccaacgcgtcgggcaccgctcgacgctacagaggagatccccatggcctacgcacgcattgtttcgaccgccgacaattacctgcaccacatcagcaatggcagcgtcgatgtggatgcggacgagcccgcctcgttgggcggccagggcaagggcttcgcgccgttcgacctgtacctggcctcgctggcggcgtgcaccgccatcaccctgcgcatgtacgcgcagcgcaagggctgggacctgggcgagttccatgccgagctgcgctcggaacgtgatgaggacgggcgcctccacgtgcaccgcgtgctgcatgccagtgccgagctgagcgatgcgcagtggcagcgattgctggaggtggtggaaaagaccccggtgaccctggtgatgcgcgaaggtgcacgcatcaccagtgagcgtggggcggcggcgtaacagagggctcagcgccgtgaatgcagcaccgtgcgctggcgcatcgcgttgaattcctgctccacctgctggatgtcttcggcctggaacccggcggcatccagcagctggtcggcggcagcggccgccagcggatcatcgtcacgctggcgccagcagcgcgccggcaggaagtagcccacttcgctgcgcccgcgcatgatcaccaccggccggcccgcgtacagcaggaactcggccaggtgctggcgcaggccctccacggaaacataggccggtccaacacccagcatctggctggacggttcgggactctcgaacagcttgcgacggctcatccactcctccttttgaacaacgcgtggtctcctttccctagacgggcgcatcgctgcgcccccgccacgcactacgtgatccgcatcacgccgtcactcagaagccggtattgaactccagctggaacacgtcgatcgacagcggcgcaccggacacttccttggccgccatccacttgccgctgatccagctgcgcgcatccagcgcgtaggcaccgcccacgtagtagccgcgggcgttggtgccgccgaggtggaagttcggatcgttgtaggcatccggcagcgcatcggcctcgatgtgcttgtagcccagcagcgcctgccactggcccttctccttcagctcggtggcaccgaaggtggcctgcagcatccatgcggtgtcgccgctgcggaaggtatcgatgctggcggcaccaccggcaccgtagttgttgacgatgccgttgttggcgcgactgaacatggcctgcttgtcgtaggccaggttgcggatgtagtcgccttcaaggcgcaggccgacgtcctgggccagctgcgtatcccagcgcaggttcagcgtggccaggcggaatgccgaggacaggccgacatactgcggggtgggcgtattggccggatccagcggattgcgcgcgatgtcgcggatcagcatcagggtgttgcccttctgcatgaacgccggacgcgaccagtcggtgtcgcagcccaccgcgcccgcatacagcgcgcacggcgaggacaggcggccgctgatgttcttgaagtcgtagtagcccagtgccgcgcgcagcgcgttgtcgtcattgaagcgccagttcacgcccacctgcgccccggacagccacttgttctcgttcggggtcttgacccggctctggctgggcgcgctgtcggaggtgtattccagcggtaccaccgccaggttgccgaacaggccgaggtcgccgccgtcgaagtcgtacttcaggttggcggccaggccatcgaagttgaggtcgttggagaacagcgtgtcgctggtccagaacggattgccgaagcggccgccgcgcaccgtcacccagtcggccgggctgtaggccagccatgcctggtccagccatacatccttcttgctcaggccgccacccagctgctcggtggtcgacaccgggccattgctgctgccgctggccaggcgcacaccggccgtggtgtgctggccgatggtcgcctcgatgcccaggcgggcgcggatgcgccacaggttgcggcggtcctggcgggtgttcagcagtggtggcagctgcaggttggtgttggtgttggtgtcgaagccgttgccggaattgatcgacgaccagttgctcacgatgtcgctgttgcgttcggagaagaagcgcgattcgctgcgcacgcgcatgtcaccagtgaccttgatgcgcttggtccactcagccacttcgttcggtgccgcccagccctcggacctggcctgcgccatcacgtcctggcgtacttcgtcacggatgccgtcgcgcacgctctgcggcacgtaaggtacacgcacgtcgccggcttccagggcgacaccgccactggcggccgaggtcgcggtggctgcgctgcgctgggcggccgccgcttcggcctcggcctcggcctgcaccagcaatgcctggccgtcttctggtttcagtgcgccgctggcgatcaggcccttgatcagcttgaccatggtggtttcagcggccatcgcaccggccggggcggccaggctgagcagcacggcgcagcacagcagcgcccgtcgggccggccgcgggcggcgggaatcggttcgtgcgcggacgtggtcgttcatcacggttctcatcgaaagaagggaaatcacggaggtcgggaatcaggccccgggccggcggccctggatcaggacgcgggcggggaaatcaagcgacggtgggggtgcctggtcgaccttgccgatgcggcgcagtgcatcgagcacggccgcgtcggcctcctcgttgccactgccacgcaccagctcgaccttttccaggcggccatcgctggccagccacacattcacctgcagctggaacgccaggcgcttgaccttgtcgtcgcgcgagattgcctgctgcatcaggtagccgaggtagcgcccataggtggcattgccggcaccgccgcgaccgacgccggacgaaccgccaccactgccggactggatgccgaagttgtcaccgccggcctgcgcatcggcgttcatcgtcaccggatcggcattgtccggagtcggtgccggctcttcagccggcgtcggctgctccagcggctccggttcgggcatcgcctcctccggcggcgtttccggctccggcggcttttccggcggcggcggggtggcggaggcgctggcggcagcgccagcatcggcggctgcaccaccggccggcgggtgctggcggtgtccttgaacagcatccaccacacggcgatgccgagcaccagcaacgcggccagcaccagcgcgacagtcaccagcagctggcgaccgcgcatgccgggctccggccgagggggttgatgggccgtcatgcctcagccctgcgccttgccggtgaccagaccgacctgggcgagctccaggcgccgcagcaggtccagcacctcgaccacgcgggcgtactgcacctgcgcgtcaccgcgcacgatcaccgggaaatccggcgtggtcgcgcgctcggtgcgcaggcggtcttccagctccgccatcgtcaccgggtaggcatccagaaacacctggccactggggtcgatggtgatcgccttggtcttgggcttctccagcgcgacgctgttgctggccttcggcaggttgacctcgatgccggggatggaagcgttgctggtcaggatgaagatcaccagcaccaccagcagcacatcgacgaagggcgtcacgttgatgcccttctcgcgcttcttgatgccgaacttcgccttctggcccatggcgcgcccctcagccctggaccgcggccgggccgcgcccgtcctgctcttcggccaggcgcgcggcgaattcgtcgatgaacaccgccatgtccgcaccgatcgcttcggcacgcgcgcccaggtagttgtagccgaacagcgccgggatcgcgacgccgaggccggcggcggtacacagcaacgccgcggccatgcccggtgccaccgagttgatgtccaccgcgccggccattgccgcaaccacgaacaccagcatgatgccgatcacggtgccgaacaggcccacgtagggcgcgccttcgatggtggtcgacaaccagttcatgcgccgcgccatcgcttcctgctcgcgcaccatcactgcatccatcgaggcgcggatcgccgcgatggtggcaccactgaggtaaccgctgttgccatcgcgctggtggcgttgctgcatttcatcgatggccacttggtagatgcgccacaacgagccatcgtgcatggcggtcggcgccctgccctggcggtccatgtcggacagggtgcgcagcggtacgccggacagcttgccgaagctctcggtgaacacggcattggccttgctggtacggccgaagtggcggctcttggcgatcatgatcgcccacgacagcagcatcatcaggccgaggatggcgaccaccacccaggcatcgaacggcatcgccttgaggatgaaggcgaagtggctctgcccggcggactgctcgtcggcgccgtagctgaccaggcgcgagtcggcgccctgagcggtggcgtcggccagcagcagcgcggccgggcgtgccacccgcgaaatgcgcaactcgtccagggcaccttcgaagttggccagcggctgcgcggcgcccggcgcatcggcgccgaccaccggcgcggtggccagcgccggcagcgcaccgctcagctgggcagctacgcgcccattgaggtacagctgcaacgcgcccttctctgccgtcagtgcaacatgcgcccactgcccttccggaatcggttgcgccggcgtgctgcgctggccattgagctgcacgaacggcacgcggttctcgatgcccagcaccagttcggaagcaccatcacggcgggcgtagattgcttgagccgcattgttgctgcccggcttgatccaggccgaaacggtgagcggcgcgcccgcttcctgcgccagcgacgcgctggccggcagcggcagcgggccggcgcccagctgcacgccgcggccgatcaccgcgccttccgacggcggcaccaccgcaccggcattgttgccataggcggtggtgtcgcgtgccggcgcattggcctcggcaaagtgatagaccagcgtgtagtccggatcgaacacctgctggccgttgccgctggccggggctttttcattgccgtagtacatccagatggtctgcggcgcggcggcactgaccgccggcaggtccacccagaccagggccaggcccagcgtgggatcgaactgctcgatctggtgggccagcacggtacggccatcacccgagacgaagcgaaggtcgttgcccgcatcctgggtgccgtcgaagccgaagttgccggtatgcagccgcagcagcagtggcgtgcggcccgggtcaccggccaggcccgcgccctgcgggccggcgtcgacggtgatcggcttgcggtatttccattcggcctgccaccaattggcatcggccgcagccgccggcaacgcaaccagcgcggccagcagcagcaatactcgggaaagcaaacggtccatgcgaagggtctccggagaacgcatgttcaagggaagggtcagtagctggtgctgatgttgaaatgcaggcgcgggtcgtccttgcgcgtgaccgggccatcggcataaggccaggcgtagtccaggcgcagttgcaggtgttcacccaggcgcagctgcgtgcccaggccgaccgaggccaggttgtacttgtcacgctgctcgggcagcggccggcgcaggcgcaggtaggccgcgtcggcgaagctgtagacacgcagatcggtgccgctccacagcgaccacgccggggtgcgccattccaggctggccaggccgccgtagtcgccgatcgcctcggccgacaggtagccacgcacggtgtacatgccgccagcagcgaactgctcggccgacaccagtggcgcatcggttacctgcagcgagccacgcgcataccactgccagtcattgctgaaggtgtgggtgttggccacgtcggccttgaaggccacgaagctcgggtcagcccagtagcgcttctgcccgaacgcggtggcgtcgctgccgtaaccgaacaggcggcgggtaccggccaccagctgggtgttgatgctcagctgatcctgctcgccctggcgcacgccgacgaaggccagggtgatcggcgcatacttcaacggtgtcttcaggctgtccttgcccatctgcgtgtcttcctcggtgtccttgaaatccacaccgagactgagctggcgccaccactggctgctgccggcaaggcggtagttgagcttgaggccgatcgaatggccgttgccgatcacattggtgccggtgccggtaccgacctgcccgcttgcattcaacacgcggctgtcggatctgtagccggaggcttccaggctccacggcgtgccttcgaacggcatcgtgtacgaggccgagaacaccttggcctgctttgtatcttccggcgccaggtacacgccgatgttggcgctgtgcccgcgcttccacaggttgtcgtaggccagcgacgcactcaggcgcagcttctcggtgtcggcactgtggtcgttgttgagtgacgcgctggcacgccacggcgacttctcctcgacctgcaggtccacatccatcgtgcccggcacctggccttcgcgcaccagcggcatcacctggcgacgcccgccttcgttcagtgcggtcagttccttctgggcctggtcgaagtccggcaccttgccctcggccagtgccggtacgcgatcgcgtatgcggtcgggcgattcgtggcgggtgccgaccacgcgcagctggccgatcggcgtctgctgcaccttcagcagcaccacgccgccactgacctgctgctcggggagttcgacgtagaccgactggtagcccgcctgctggtacagcgcgtggaccgcatcgcgcgccttctcgacatcggccagggtcctgcccgggccgaggaacggctctaccgcccgttcgatctgacgcggatcgagcacggtgttgccgcgcacgatgtattcattgatgttcacgctgggcgcaggcgctgcctcctgcgcgaacgatggcagcggcatcgcggccagcgccagcaccagcggatgcaggcgcaacggaaagcggacggctcggcacggaacaggagtcatcgaaggcatcgcgtcgtatcggagggagtggccagggagcggcgcgtgggtctaccaacaggacgtgcacgtcgcgtcaaaaccgccaccagttttgtgacagcactgtcatcttgtgacagcgccagagcactcgccggcgtagactgccctcgccacacgtcttcattgcagagcgtcggttgttgcaggagattcgagatgagtgagccattgaaggcgggccttcgccctgccctcgcccttgccttgttgctggcgttgccatcggcctgggccggagaggcgaagaagcaggacggtgctgcgccgtgcatcgaagtacaggtcaacggcgagcgcatccccgcgtgggaatgcctgcaacgcaggctggcgccggcgccgaaatcggcgaagtcagcggcgctgccggatgccgaacgcctgatgcggcagcccggcaaccagctgatgcagtacaacctggaaggcacgcggcaacgcatgggcgatgccttcgggcggtccgtggtaccgcagcgtccggcgcgatgaacccatgcaactgcagagccgagcccacgcccggctgcgcctgcacaccgttcaacagccatgcagaggcagccgagcgcgggctcggctctaccgagcgccgccctgcggagcggccggcacgatgccatcgttcggcaccggtggcagcgcgggcaccggcaggctgcgcgattgcccagcctggttcagttccaccgcgttggcgctgatgctggccagcaccgtacagggccccagccgctggccgggcgcgtaagcctccggcgggcgtccatccaccgacaacagggccaggggcgcgtggtcacccgccatcacacccagcacgaccacctcggtctgcaccgcaccgggcgacagcagccgcaccagcggcagactggccaccgcatcgaacagcggccgggccggcgcatcggcatgcgcttcgctggccgccgccgcaggcgccaccgcagacagggtgacgctccaataggccaccaccgccagcagcagggtggccgccagcagggtcaacatccgattgcgatcccagcgcctgccatccatgttccgcaccatcgccacgttcgtgtccgcccacgctagcagccgccgctgacgcttttgtttcatcatacgggcctacgctggcaggcatcgacctggacaggaggcaacgtcgatgcagcacgtgccgcgtggtttcaccctgctggaactgatggtggtgctggtgatcatcggcatctgcacggcgggcatcggcctgggcctgggcagcctgctcgaccccgcgcgccagctgcggcaggaggccgaacgactggcgcagcgcctgcaggtggcgcgcgacgaggcccgcatcgatggccgccccctgcgctggcaggccgacgccgccggctaccggttcagcaggcgcgaaggcacccgctgggtggacgtgcaacgcgacgacctgctgcgcccacagtcatggcaaccggccggcatcgtggtgcagccggccaccccggttgaactgagcccggagtggatcggcgtggcatgggaactgacgttgtcgttgcagggccgccagctgcgtcttcgtgacgatggcagcggacagttgcaggtcgtgcagtgaagcggaacatgcccggattcaccttgatcgaagtgctgatcgcactggcgatcgtttcgattgcgctggctgcggtcatgcgctcggtcgcggtggccaccgacgatcagtcacgcctgcgcgaccgtcgcctggcgctgctgtgcgcgcaggaccgctggcaggagctgcgcctggccgggcagccgccgcaggatgcacggctgcgctgcgtgcaggggcgaagcagtttcctggtgctgcagcatatcggcacggggggtgacggacagccgcaactggaactcagcgtggctgccgaagatgcaccgcggcagtcgctggcgcggatgcagctgccgtggaccgcggcgcaatgaagcgtaccgcagcaggcttcacccttatcgaggtgatgatcgcgatcaccatcatgggcgtgctggcgctgatctgctggcgagcgctcgacagcgtggccagcagcgaccggcgcctgcgccgggccgatgccgagaccacgacggcactgcgcgtgctgcagcagttccagcgcgatatcgagatgcgtgccgacgatgcgctgatgaacggcgcggtgcgcccggcggatcgtccgcagcgactgttgccgccttcgctggtgagcgaatggcacccggatggcagctttgcgctggaaatcacccgcagcgtcgacagtgatgggctgcgctggcagcgggtgcgctggtggcggcaaggcaacacgctgtggcgcgccagcggtacggcgacggaccgctatcccctgcccgcgccggttccttcggaaggcattgcagtggcaaaggatgtgcagcggttcgaggtgcgcgcctggcagcccggggccggctgggcgatgctgccgagcgagggcgaggtgctgccggccaccgggctggaactgcggctgggcctgcgtgacgggcgtggaccgctgggctaccggcgcgtgctggagctttaggattcctcccaggcaaagcacccacgcatggcgtggatctactgccgagcggcttctactgcccggcctgccctggtgggtgccgaccgttggtcggcactgaggctggtccgggcatccgcgcatgccgtggacctactgccgagcctgccgccgggcgcgctcctgcacccggcggcgccgtgtcggtggtcctcaccgctgatggccgctccctgccctccgtgccatcctggctggggccgccaccgttccgtggcggctggcccgatgctgttcgttctttcggcccggtcgcatccacgcatggcgtggatctactgccgagcttggtgggcagcaacgtgtgccgaccaaggacggcacctatcggcgctgcgtgccctcgtcgcgacttgcctgcgggaactggaaggcactgttggcgtcataaccgctgttggcagtgttgccacgcgccggcgggtcgatgctgctggtgccactgccgaagccgaggatctgcacgctgatcaccgacggctggttgcgccgtgcctcgtcctggctcttgcgcatcacatcctgtgccgcctggctggcgctgttggctgccgcactggccgaggccagcgcattgacgttcaccgatgccagcaccggcaggcccttgctctcgccctgcacctggatgttggccgcgttgagcacctgcagtgcggccaggttgatgttgcccgagacgcggataccggcctcgcccgcatcgatggtgccaagcggtgcgatcaggtcgacgtcgcccggcggtacttcggcaatggggttcaaggtcgcgatgccggcaccgctggccggggcctgcggcgacaggattacattgccccagccgtcatagacgcggcgcggtggcgtgtacagcaacgtcgtccgcgaaccacgaccggcgttgatgtcaccctgctccgaccacgccaggatgtcgccgccgaaggtggtcatcacccgcgacaggcccagcagcacgctgtcctggctgaacagccggatatcgccttgcccctgggtgacaaggccggcgctggcaggtggcaccacgccctgcacaccgatcacgatctgcccacccggtgccatcagctcgatgttgccgcccgcctcggtacgcacgccggagccaccgtacatcacgatatcgccggtacggtcgatcgtcgcaccggccgcattcctgtccggcatcagcgtggcgatggcttcgcgcccacgcaggtaggagccgaagcgggacccttctgcatcggtatattcccgtccaccttcgcgcagctcggcgtaatagacctggcgcaggaagatgcgctgctgttcctgcggcagcgcatcgaacgcggccagcgccccgtcgccgtcggccgccacgccgaagcgctgctgcagccactgcttcagctcctggttgtagaccttgactgccttgcccggctgcgatgcaagcgattgcgcgggatcggcaaggttggcagggtgcagataacgggcacgcagggccgcgaagtcgatctgctggttgccggccgtcagcgcgatgctggcgccgggacgggtgtcgccctgcacgatgccaccgaggctggcgatgctgcccgcatcctcctggcgcaactggcggccggcactgatctcgacgttgccagggccggcaatggtcgcattcagatgcacgatgtcgcggcccgccgtcgccaccgtgatgtcggtgggcgcggtgttcaacgcggtcatcgacaccccgaggatgtcccggcctgcccgcagttgcacggcgccggcggcctcgaaccagttcaactgcgtgcgctgccccgcgttgggattcagcgtgcgccgggcgccggtggccagaccgataatgtcgccctgcaccgcgtagtaacggctcggcgccagtgccgcagacacagtggacagcggcgtattcggaccgaatgcgaacagtggaagcgaccccgccggcgatgccgtgttgccgtcgacggacaggttgtgccgcgagcgggtcacattgcctgcggaatccccctgctcggccatgaatgccgggtcgaagggtcccggcaggcgcgcgtcactggccgagcgcgcgatctgggtcgcgccaggctgggcgaagatgccgccaccggccaggacgtccagccgtcctgtcgccgagggtgccagcagaatcacatcctgcgtccccggcgtggtgctgatccggtccagcttgatgtcaccctgcgcagcaatggcgctgaagcgcgaaggatagagccagtaattcagcagatcatcgccgccacgcacaacaagctggacctgctcccgccacagattgctgcccgtcacgttttccggcccggcgaggcctggcgcgaggtcaccaccggcactgaacagatccacggccgtgttggcggtccacagggagaaccacgtactgcctgcagcgtgcgcgctatcatcctgcagcaccgcgctgtagttggccagcggaacccggccggcatcggcgacgccgccgagcaccacatcgccccgcgcctgcagctgcgcggcggcgtcgcccagcaccagcaccggcccgcccatcgcgcgggcggcgtcaggcgcaaacaggtctgccgcccgctgcttacccagcgtcgcgtagctttccagggtgacgcccattgcaccgatgcgccccgcatcgagctgcaggctcccacgcaggttgctgaaggtaccgttgaggtcgagattctgtcccgccctggaggggttgaggctggagatcgtcgcctgcaggttcggattcagcgcgccaccgatacgcagctgcaggtcgccgccgccggtcaggtgcagctggccatcgctgacccggccggtcgatcccaccgcggcaatgatcgcacccgagcgcggtgcgatcgtcgagaccaacgcgtcacctatcgcatcgcgcacgccggcgtcacgcccggcctccagcgtcaggttgcccccgcccaatgtgccgaagccggtgaaaccaaccatccgtggagaggcgccagcggcagcggacacgttggtgtaggcgccaaagttcacccaccagctggtcggcaccggctccaccccagtggtgccgccggtaccctgccgccacagccagttgccgaccgcggcactggagtacagcgcccagtcgcgatcgctgctgcccgactctgcgcgcgcggtccaggcgtcgccgacgatatcgcgcccggcttcgacgcgcaggttgccaccatgatccggataccaggcctggtagcctgccatcgcggcgtcatagctgcccggcaccaggttcggtcccagcactgcggtgttccaaggggccgctgcacggggcgaattgaaggcagcgtcgcggcccccacccagcgcggcgggagtgccggcggtgtagacgccaaagcctgacttcatcacgacgtcaccggccgcgagcagttccatgtcgcccctgccggtgcgcagtacgctccacgccggcgtgcctgcgcgcttgccgtaagtggtcacttcggtctgcgtgccgccgccggcgcagtaggtgggcgcggtgctgcagaactcgtcttcggtcatgccaaacatcgcggcgaagtccttcgcaggagtgcctgcgtaggactcgtcgccccagtaatccagcgagccctgcgcggccacctggcggggtgccgggccgcagtagtcggccgacatcgcgcagaactcgtcttcggtgaagccgaacatgtcggccagctccgcgatcggacggcctgcataggaggtgtcgccgatccagtccaacgatgcctgctcggtcaacgcgcgatcccccacccagatgatttccgtcttgaccgtgccgatcgagccctggtgggtatcggccagcaccacgctgccatcgctgccccagcgccggctgcgtgggtcggctgccccggcatcggcgccggcaacaacggtcaggtcccaggaggtggtgccctcggccagcatcggcgccagcgcccagttgcgcccctggttgccgccggcatcggccggcctcagattcaccggcgcgtcgccgggcagctccaccttggtcaacgacgggatgtacgcgcccaccttgagcgcgacttcgcgtgccaggcgcagcgcaaccggcagcaccgcgccggcgggccactcctgtgccgccatctgtaccgcactgcgcaggcggaagccggctcccagccgcgcaccggccgccagcatcagcggctcctgcagcacggtgcccgcggccagcgtctgcccggagtcggtggtcaccgccgcacccagcaccgtgcctgcaggcagccgcaggttctgcgagatcaccatcggcgcgggcagcacggtaccgaccggaagcgttaccgattcgaccggcacgtcatagttcaggcgggtgccggcctggaactcggtgccgggctgcagcttcactccgtccaccggcaccaccagcccaccgccaaagggggtgtgccccgcgctgccattgcggccctcgtacagctgccagccgccctcatccggcgtggacggcggcgctgcgaacccatcgttgatgctgccgtagacgttgatgttgccttcggcgcgcagcaccagcgaggccgattcgccgaagccacgccgcgatggatcggcgcggttggcatcggggccataacggtagccggacagatcgatgtcgccggcgatggtcaggtcgccgtccgggttggcgtcgctgcgccgcgccagcacctgcacgccgggacgaaggcgcacatcgcccagcgcccgcgtgcgctgctgcagatccgcgttgcccagcgcaccatcgatccaggccacgctgtgcggatcgactacctggtccagccactgctgggtgaccagctgcgcgcggttgccgcccacgtcagcggtggttgccaggggcgcatcgtcgtagcggcgaacaccattgagctggatgtcggccgcgccatcgatgcgcaggccggtggccgcggcaatcgccgcgtcgttgctgcccagccgcggcacatcgatcttcagcgtgccgcgcggggtgccatcgttctggccaggacgtccaccgacggcaacgtcgctgcccgcacgcaggtccagctgcgccgcgctgcccaggccgacggcaccctcggcgctgcccagcgtgatggtggcccggttgggactgtcgatgatcttgccatggctgtccacgcgcaggccggtaccgtgcgcgtccagcgtaccgtccacctgcaactgatcgcgggcgtacaggcggatgctgccgacctgctcgccgctggcatcgatgcggccggccacggtcaggctgcccgcatcgacgctgatatcgaccctgcgcgccttcacttcgtcgccgatccgcagatcgccctcaccgatctggaagctgcgacccccgacgacgccgccggcagtcaatcgctggttgaggccggcgaagtcctgcagctggcgtgcgcgcaccaccagttcgccaccgtcatagggcaccagcgtgccaccggcatcgtaacgaccagtggcggcaccctgcagaacaccggccagatcggctcggccggccattgcggtgaccgtcaggcgtccgccgcggttgttgcgtgcggaaacatcgatgcgggaggccgcatcggcgcggatgtcacccgtgtcgctggacagcaggacatcgccgccccagctgaacttgtccacgtcgtacagcgagaccttgcgcccggccaggtccagcgcggcccggctgccaagcgtgatgccctcgcgcgcgttcgccgacagccgtccggacgccagcgcgatcgtgctgtccagcgcgatccggttggcgtcgatgctcaactcactgcccagtgcatcgccacccgtcttgccggcgccaccctgcaggcggaagtcgccgccggtgcgcacgcgcagctgcgcggcgggatcggcagccaatagcggtgtatcgataccgaggttgcctccgctgtactgccaccccttgtcggccagatagtcgccacgctgctggaatacgtccagcgtgccctgcgcggagaacgacagctgctccgaggcactcaggttcagcgcactgaagccgagcacctgccggttcgcaggtacttcagagctgggacggctgaatggcgcccgccccagctgcagctgccgggtgacgatgtccagttgcccggccccgagccggtccaccatcggctcggccggcggcaccgtcgcgtcgctgcccggcgcctggcccgccgccaatgagccgtcccagaccagcgtgtccaccaggatgcgcgcgcggtcggtcgccgcaccgtagccgcggatggcctgcgcaccgagcacaagcgtctgcaggccactgcggccggtggcactgtcgcgcgcatccaggtcgacgctgccgaacacgttgacagactcccgcgcgaccagactcaacgtgtctagcgccggcgcgccggtcgcatcattgccgcgcagcagttgttgcagcacggactggttcatggtcatgccactgggcagcgccccggccgcagcggcctgggcgatcgcttcggcactgccgaggttcagcgccgccatgctcaggccgagctggcgggtgccatagctggccgagtcgcgcatctgcagcgcgccatcggtcgctaccgcgatgctgccatcggaaaccagccgcgtctggccgtcgcacgccgcctggcatccgccgatgtcgatcgccaccggaccggcctccaccccggtggtgccggtgatcaggttcaggcgctggttggacaccgccagcaggccgccggagacctggtaaggcagcgtcgcgctggcattcgcgttggcggatgcgaacggcagtgtatcgagggtcgcaccggcctcgaccagcacgccactgccaccggaggccgctgccaccagcacttccggtgcgttcaaggtgacgccggaacggatcgccacgctgcgcgcctggccggtcaccgccacctgcgaggcctcctggttgaactgcccgccgatcatcatccgcgccggcaggaaggcattgagcgcgtcgtcgctgaaggtggcgccgcgatcactcgcctgcgattgcgtggtgccatcgaggatctccagcgaaccgaccgccgggctcgccaacgtggctgccagcgtgccaccacgccccttgtcggtggcagccgcgaaccgcgcggtgccggcgaagtggatggcaggcgttgctgcacgacctgcaccttcgcccagcgcaagggtcaacccgagcgcatcgatggtctgccagccacgcgactcgccgcggcggtcggccaccgattgcgcgaagctgttgtaggaggtttcgttgtagcccgagtgccggcgtaccacggccgcgggagtcagcaggatgtcggtgagcaacggcgagattgccgcgcccagcgccgtgcgctgctgcccggacacacgccaggtgccggtgccggtcgcaatcggttgcacgatgccggaggtgccggtggcgcccagctccacccggaatgcgccgggctgcagcgcatagcttgccggcatcagcgtgtaggtgccggccgccaggccgggcacgccagccggcacggtgatctgctggcccaccgccggagctgcgaacccttcttcgccactgggggcgaacgccccggcgcgtcccggtacgatcgcgtacaccgggttgcccgacgcactgaacccgtagcgcgggttggcgtcggccaacgccgtacgcaggacgtcgacagagccaccgcgtcctgacacgaaggcggcgccggtcaactcaccaccgccggacatgtccagcagggcccccggcgccacctcgatctcgttggccttcagtgtcacccccatcgaggagataccggccggcgtcagcgaacccaggctgcgcgtaccgacccgccagtcaacaccatcgacggtgccaccatagggcagcgacaagccggcgccactggtcgaggttacgctgcctggcagcagttccacccggctgccgacggttccgttctggatcaggccacccagctgcagcgtgcccatcggcgcctgtacgttgccgccctgctgcaccgtggcggccaccaggcgaagcgtacccagcgccgattccggcgccggcttcgtggccgcaccggtgccgtggatgcgcagcacggcatccggatcggaccagtaatcagcggtctgcacggtctgcgccgacgcgccggccaccagcgtgccgaccgcgcctgtggtgggatacaggcgcgcagcggtcacgtccatcgaaccagccgtcatcaacgcgctggtgttgccactgctggcaatgccgttggtcaggcgcacgtcactgcggctttccagcgccacatgcttgaaacccggcagccaggtgacgtcgcggatgtcgatcagcccggcctgcaccgccagcgcgtgatcttccggcccggacgaagcgaccgcggcggtgccctgcaggttctcgcccggcatctggcgccagcgtgcctgcgccaggcgaacgtagggcgcactcagtcgcagccccgacgatggcccggcatccacggccatgcccaggctcgaagtaccctggccgtggatgcgcaggctctgggccaggcgcaggtcgacgtcgccgaccgcgcggatgtcaccgaacacggacagattgtcgaaaccgccagcctgcagctgctcgaccgacaacgcggcgtggccatactccaatgtggccggcagtggctgccccggtgcgctgtgctggctgagggtgatcgcacgtgaccgcagtacctcctcgctggcgccacgtgcatggatgctgccgccaaaggccagccccagggtgccgccgcgtgcgccggcaccgccggcggccgcatccatcccgccgtccaggtacagcgcattggccgagcgcagcacgatctgcccgccatcgctgtccacgcgcacgcggccctggccgtcgacgtccagctcggccgacgcgccccgcgcctgcaggcgcgcaccgcgttcgaccaccacgaaggcttccggtggtcggttgtcgacgaacgctgtggtctcccagtccagcgccccgccaatctcgatgcgtccacccgcgcgcacctgcccgcgcagacggccgctggaatcgggcagcgaaatcgcgtctgcatcggcatccagcagcgcgccttcggcgaaacgccaggtgcgttcggtgcgctgcccggcgtacagcgcgttctccgggcgcacatcgtcgatcaggatgcgtccgcccttcgcgcgcagcgtgccttcaacatcgatgttgcccgcaccaagcagcgagatcgtctgccctggatcgaccgccaccagtgcatccttgccgacccgcaggtcaccgcccacgctgttgcgctccgaacgcaggctgatgctcgcacccgcgcgctggctgacgcgcccgctcgacggatcggcgctgtacagcggttcgtcccacgccgccagtgcggacgcccggtcggtcgccatcggcgcgtcctgggtcaggcgcaggcctggcagggcagcgaccagccgcgcgccatcggccacctccacgccgtggtggccattgatgtcgtactgcgcgaagccactgccgaacaggccggggtccagtcgcagcgacgcgcccgccaggtccgcatcgcccacccgcacctggccaccggtccccagcgagaaagaaccaccgccctgtcctcgaccactgaaccggcttccctcacccagttgcacccggccactgccatcggtcgtaaccgtactgctgttcgcctgcaggctgacgctgccgcctttaccgatatgggccttgccgcgcaggtccagcgcagcaccggcctcgacgtcaaccgttgccttggcgcccacggccacgtcatgactgttgcccaggctcaggcggccgccatccgtccaggcaccgctcgcgtcgcgcggcatcgccagtgaggcgttgctccattcgccggagaggtcgatccgcgttccgtcggcaatgacggtgcgggcgcggccatcgtgcagcagcgccgtcggccggccctggacatccagcaggttgcccgccgacaactggccgccggcaatgccgatgtcgcctgccagctccacctcgctgccgatcaggttgagctgcccgccggcctgaagccgaaggctgccgtcgatgcggatgtgatcggcggtcgccaggtcgatccgcccccactgctgggcactcagctctgcgatatccagccacaccgtgtcacgccgctcctcgttgaccggagccgccagcgaccacgccgtcttcgtcggagccttgtcacccaggcgcacatccgagccgaacacaccactgcggccctggccgtcgtagcgccccaggtacaactgcgcattgcgcgcgaccgccgtctgcgcctgtgcatagccatccagcgcggcatccggcctgcggttctgctgcgcgccctggaaggttgcagtctcaacctttccatccagcaccgcggtcggtgcggagacgatcagccgtcctgcatcgcggccgaccgtgtacccgttatcgacccgctgcgccgcgaatacgatcggatcacggaaggtctcggtgatgccccagcgttcctgcttcacttcatggccgctgtacaggccatcgaacagcatctccgctggcgcctcatcaagacggtagacctggccatcaacgccgcgcacccagctctgccggaccacgccgctctgcacatccaggctgccgccggcaaggttgatgcgtgagccaccctgcgtgatcacttccctgccgcccagcaggacggtgcctccctgcgcagcccattcgccgatcgagtgcccctggttgtcgaggtagccccccacttccagcaggccgcctgcggcgtaccagcgctcaccctcgtagcccccggtaccggccggaacgtggaccagcctgcggcggtcgacccagacttcgctgctggtcagcttgccgctgtcgcggttgtccagggcatcgcgcagttcgttgccctgcaccttgacctggacattgttgctctccatcgacacctgcacgcccactgcgccggacacgtccacgcgcgcggcatcgtccacgtagctacgggccgccgcatcggcgatgatctggccgcccgtggcaaccgtcagcgaatccgcgctgaaatggatgttgccacccgagacgatctccacccgcgactggtcccggcgatcattgtgctgggacagattgtcgaaggttgccgaacgcgcgccagcgcggatcgcgtcctgctcggccgattccttgattagggcgtcgcgctgcgtatccagcaccgtggtcttgccatcgtcctcgatcagcaccgccgtggtggctccgtcagcaagcgtgacgctgctgcctgcatcactggccgaggccagaagatggacggtgccgcgctgtgcaagcgtggtgctggccacggccacaccggcctgctcgacgctgcgtccggccagggtcacgtcaccctcgagtgcgcgcagcaggccggtattgcgcacgctgccagccgtgctgccagcgatgaagcgcggtgcgatttcattgccgcgggtggtggaactggtgttggcggccgtacccacgccgcgccggatcacgaaactgtcacctgccgcgagctgcacctggcccttgcgcgcttcgatctggccagcattgtccacgctgtgcccggccagcagcacgtagccaccgccgcgcgtcgcactggtcggctcatgggtcgcgatgcgggcgccccgctccaccatcaccttgccgaatgcatcgctaagcgcgctgctgctggcgtcggggctgtacaggccgttgtcgcggaactgcgcatcgctgatccgtgctgcagccgccagcagattgcgtacattgacctggctgttgttgccgaacaccacgccgttgcggttggccacgaacaccgtgccactggccttcagctggcccaggatctggctgggccgcgcctgcggatcgttgacgcggttcagtactgcccagtcagggttctgcaggaaattcagcgtggtgttgccgccgatgttgaaggtctcccagttcaggatcgccttgtccgcggtctgctctaccgtgacctgcaccctcccgtcgctgccctgcgactggatcgcgtcgcgcgcattgagccagccacgggtcagcgggttctggtcgacgctcaggccgtccttgccgaggccatcggcaacgatgaagccagcctcgcggtgcgcctgccgggcttgttcctgcaggcgctgctgcagggcaatcgcctgtgccgcagtgccaagattgtcgatcgactgctgcagcttctgccgtgccgcatcctgctgctgggccggtaactggaactggatcggcacgccgttgggcatccggccactctgtgccgcgctgccctgggccgcgccccgttcggcgaaccagcccggactgaacgcctgctgcgcctggctggccggggctaccatgctccccagtgcgaccgcgatggcccacgccatcggatgattgcggcgcatcgacgcggccggatgaacagcggacgggagcgggtgcgacatcggaacctcatcaacctggtgggccgcagctgcggcgacgatcggggaggcacacgcaacgcatgccctgccactgatagacggttcacgcgagacgaagccgacagccaaacgctgcaacggcggcaccgtcgcggaaatggcgacgccggcccagaggccggcgtcgggtcaagcaggattcaacccgtactgcggattacagcggacggccgatgccggcgcaggtgctggggttgttcaggccggcagtgctgctggccagcacgaaacggttgcggatcgcatcgcgccaggccttggtcagcgggatgaagccgtggtcggtgatcgacttctcatacgcgacggtgtaggtcgccggatagtggcgcgccaggaagccgcgcaggctggtggcgacgctcgaatccttgtagcactggccgatcaccaggttggtgtacccggcgatcggatagccggccgacgggttgccgaacaccggcacccagttggcggggttctctgcatcggtgccggtcggcggagcgacggtgtccagggtggcctgcacgctcacctggtccggcgagaagcccttgaccttggcaaccttggtcgcatcggtcaggttcgggatcacgtccgggccaacgtagccgatgcggccttcagccgcgtagacagtgttgtacagcgaggtgccgccggtggccggggcggccaccaggaacgccggcaggttgccgtttgcatcgcgcttgtacaggtcggcgaaggtcgacttgatggcgaacttgccgcccaccagcttcgaggtgtcagcattctcagcggcacaggccgcagtcaggaagcggctgaacatttcgctggtgccgctgctttccgcgcgatacaccacctggatcgggccgctgcggttggcatcgatggtcgaccagtcgctgatcgcgcccgagaacacgccgcagatctgcgccacgctcaggttcaccgccgaaccggccttgttgaacgggatggtgaccgaggtggccaccgacggcacctggatcagcgcgccgtagcggttggcattggtcggctggttgaagttggtggtgtaggtgttcagctcggtgccgctcagtaccgaatcgctgccggcgaagtgcacggtgccggtggtcgagaacagcagcgagttgttttccaggaaggccttcttgccggtgcccgaaccggtcacggcgtagctgaagttcgccggcaggatgctgtcggacgaacccttgtagaggtcggccggcaacgaggcaccgccgccggtcacggtctgcgccgaggcggcgcccacggtagcgagcagcgcggtggcaaccagcgcggccagggtcttgcacttgttcatgatcttctcctgaagggtttactgcgaagggaaacaccaagggaggaacggtcactacacgcctgctgccgccgagggcctcccagcccgctctgcggcgacgtgtccatgctggtccgcgccgatgacaggccgcttaagaaacctgtggaagatcggaaaaaggtgtggaggattgtgtggagaatcgaagacggcgaccgggtagagtcgactgtgcgtcgactggtgcacggagcgctggtcctgtcgaagtgtgcttggaagcagtcgactccacccgtgatgcgcgttgcgcatcactgcaccagctggttcatttccatgatcggcatcagcacggccagcacgatcgtcagcaccacgccgcccatcaccaggatcatggtcggttccagcagtgcggtcagcgccatcgcgcgacgctcgatctcgcgcgagatcgtctgcgcggcgcgttcgagcagtggcgccagcgaaccggtcttctcgccgctggccaccagatgcaccaggatcggcggatagaccttctgtaccttcaacgcagcacccagtgccgcaccttcgcgtacgcgagcagccacatcatcggcacagcgcgccagcaacgcattgccaagcgtctgccgcgccgcttcgagcgcacgcagcagcggcacaccggcgtccagcaggatcgccagcgtcgaggcaaagcgcgcactgttcacacccagcacgaagcgcccgaccatcgggacccgcagcagcatcgcgtcccagcgcaggcgcagttccggccgccgcaacgccagccgccaggccaccaccagcgcagcgatgcccagccctgcccacacgccccagctgcgcacaaacgcgctggcggccagcatcacctgggtcagcatcggcagcgtctgccgtgcctgaacgaacgcggtcaccacctgcggcaccacgtagctgagcaggaagatcacgatcgccactgataccaggctgatcgccgccgggtagatgaaggcggtcagtaccttggcctgcagcgcattgcgctcttcgatgtagtcggccaggcgctccatcacccgtgccagatcgccggaatcctcacctgcacccaccagcgcccgatagatcggcgggaaatcgcgcggccgcgctgccagcgccacggtcaggcgctggccggcacgcacgtcggcgcgtactgcggtgagcgcctgggccacgtgcgggcgttcggcctgctcgatcaccgcactcaaggcgccttccaacggcaggctggcggccagcaggctggccagctggcgcgtggcccaggccagctcgctggcagacagccgccgggcagcccagccactgccggcactgcgcgccacgctgacctgcacgggtgtcagcccacgaccgcgcagcaactgccgcgcaccgcgcgggctgtcagcgtccagctggcccttctcgatgcggccctgcgcgttggaggcctggtagtcgaacagcgccatgcaagcctcagtcgtcgccggtgacgcgcaggatctcttccagcgtggtcaccccgctgtcgacccaacgctggccgtcctgacgcaaggtccgcatgccggcacgccgcgccgcctcgcgcagtgcaggttcaccctgcccttcatggatcagcgtacgcacgcgatcgtccaccacgaacaactcgtggatgccggtacgcccccgatagccgctgttggcacaggccgcgcaacccaccgcgcgccatacggtacggccgtccccatccacctcggcacgccggcattgggtgcacagccgccgcaccagccgctgcgccagcacaccgcgcagcgacgaggccagcaggaacggttccacgcccatatcggccaggcgcgtcactgccgagatcgcgtcgttggtatgcagggacgccagcacgccatggccggtcagcgacgactgcaccgcaatctgtgcggtctccaggtcgcggatctcgccgatcatgatggtgtccgggtcctggcgcaggatcgcgcgcagcgcggtgccgaagctcatgccgatgcgcgcgttcacctggatctggccgatgccggcgaagtcgtactccaccgggtcctccacggtgaggatgttgctggtgctgctgtcgagctggcccaacgcggcgtacagcgaggtggtcttgccactaccggtcgggccggtgaccagcacgatgccatgcggctgccggatcaatccggtgaacgtggccagggtgtcatcggccatgcccaggcgctgcagctgcagacggccggcatccttctccagcagtcgcagcacggcgcgctcgccatgcccggtcggcaccgtggagactcgtatatccagcggacgcccacccacgcggatcgcgatgcgcccgtcctgcggcaggcgcttctcggcgatgtccaggtgggccatgatcttgatgcgcgataccagcgctgcgtgcagtgcgcgccgtggctgcaccatgtcgcgcagcgtgccgtccacccggtagcgcaccaccgaatgggtctcgaacggctcgatgtgcagatcgctggcgccatcgcgtgcggcctgcgccagcagcgcgttgatcatgcggatcaccggcgcatcatcctgcgcgtccagcagatcggtgacttccggcatgtcctgcatcagccggtccagatcgacttcgctctcggcggcaccgaccacggcagcggcgtcgccgccgtcacggtactgctcagccaaccgctgctgccacgtcgcggcatccagtgcctggaagggcaacggtccatgccggcggcgcagttcggccacggcccatgctgcggtatcgacggtacccagcagcacaggctcaccgccaacctcggacagcatcaccccatggctgcgcacccaggcgtacggcagtggcgcggcggcgctcacggtccgatcaccagttccggcgtgtagcccagcccgcgcagttgctgcagtgccgggtccagcgtcgccgggtcgcgcggcagccgcacccgcaggcgctggccactctcgcccggcgtcgcctcggcataggcctgcaggcccagcgcccgcacctgcgccacgccctggcgggcacgggtcgggtccagcccctgtgcgaactgcaccagctgcgcatcgccgtcaccggccggatacaacgctgccaagctggtgttctgcagcggctggccctggccatcgcgcgcattgccctggccgagtacagacaggtcctgcggcggcagctgcggtgccgacagcgccggcaatgcccagctctgcaccggttgcgcgccagcctgcgcgttgcgcatgtagtcatagcggtcgcgggtcaggcgctggccggcggccgggtcacgcaccatgtgcggacgcaggaacaccatcaggttggtcttggcgcgcctgcgtgtgtcgctgcggaacaaggcacccagcaccggaatcttccccaaccccggcaccgcgtcacggccatggctgacgctgtcttccagcaggccacccagcaccatgatctggccatcgtccagcagcacgctggtatccagtgcgcgcttgttggtgatgatgccggccgtgctgttcgcgctctgcgcatcgatgctgctgacttcctggtagatgtccagcttcaccgtgccgccctcggaaatctgcgggcgtacccgcagcttcaggcccacgtcctcgcgcacgatggtctggaatggattgttgctgccgccgccaccgtcggtcacgtagcggccgctcacaaacggcacggtctgcccgaccatgatgctggccgcctcgttgtccagcgtcatcaggttcggcgtggacaggatgttggcaccgcccttgctctgcagcgcgctggccagcgccttcatgttgaggatctggccgacgccgggcaggttgatggtgccgtcgatcaccccgatcttcaggccatccttgggcagcacgtccagggtggtgcgcgcggtggtgttcagcccgctgccaccgctggtgccgccgaagtgggtgccgccgaaggtgcggccattgcccagcatccactgcacgcccagttcggccgcgtcggtctggttgacctccacgatcaggctttccaccagcacctgtgcacggcgctggtcaagctggtcgatcacccgtcgcaggttgcggtacaccggttccggcgccgagatcaacagcgtgttggtggccacgtccgcctgcaccgaaatgccgttctggctgaagccggtgctcccggcgtcgatcgggtcgcggcggttcggatccagccgctgcgattccagcgcattgctgccggtcctggcctgttgtggctgcgacggctgcgccggtgcggaacggcttgcatcgccaggcagtggcgtgatgccttcattgctgcccactgccggcgcatcgctctgccccgcgaccacgccgcgcagcacgccggcgagctgattggcctgggcattgcgcaggtagaccacatgcaggttgccggactcgtcctgcgcgcggtccagcttctccaccagctgccgggccagacgggtgcgcccgggactgctggaacgcagcagcacgctgttgctgcgggggtcggccatcaccaccaccttctggctgggctctgcgccctgcgcatccagcagcggcgcgaccatcgccgcgacgtctacggcgatgccctgctgcagcttcaccacatcggtgtccatgccggccggcgtgtcgacgctggcgatcacccgcgcgatgcgctccaggttgtcggcatagtcggtgatcaccagagtgttgttgcccgggttcgccgtgatcggattgtccgggctgatcatcggccgcagcaccgccaccagcgcggcggcgttctcgtagcgcagcggaaaggtgcgcgtggcgacctcgcctcctgcaccgccactgcccacccggccaccgagcagcttggcgtcggcctgcggcaccacccggctgacgccgccattctcgaccacggcgaagccgcgcatgcgcagcgcgcccagcagcagctgataggcctgggtacggctgaccgggccatcggagaccaccgtcatcttgccggtcacccgtgggtcgaccaggaactggcggccggtgaaccgtgccgccatccgcagcacgccaccgatatcggtatccaccaggttcagctgcaccggctcatcgcgtgtgtcctgcgctgccaccggcgccggcacgtgggccatgcccacgatcagggccaatgcagtactgcaggcaaggctgcgcatcgccctcatggatgggcacccgcggtggccaccatcacgatgtttccggaaatccgtgccgccggcatgttcgcgtcccctgtgcgtgtcagttgcagctgctgcagctcgatggccgggtcggccagcagcggcagcagccagttccatagcgcatcggcgggcaccgcctgcacctgcaggtgccagcgcccgtcacgcgcttcgatatgcaggccgtcggcaaggccggcggtcttgattccatcgcgcagcccaggaagtgtcggatgctggccctgcgccagctgctggcgctcacggacgcgcagcagcggtgccagtgcgcgcgactgcgcctgcagccgcggtagctcggcctgccagtgcgtgcgctgcttcagcagtggctccagccacaacgaccacaggcccgccaccagcagcgccaccaccatcacccacagcatccgccggtcgcgcggtggcaggcgttgccagcgctgctgcaggccggccagccccccgcccagccgcagggtgcgggccgtcactgtcccgctccgctcacccgcaggcgcccaccggcgtcgcgcgccagcagcaggccctgcacctgcagcgcctgctgccagtgctcaagccgctgcggatcgtcggccaatgcctgggcatcggcatccagctccatgtcgagctggccgggctggtaatgcaggctgcgcacctgcccggccagttccgggaccgccagcagcgtgctggctacctgccgttgcaacggcggcaacggtggcgctggtggcggcaccgccagagcacgccttgcctgcagcaccggatccaccacatcggtgatctccgggaagcgtgcgctgaactgccgcgccatgtcctgttgcagcgcctcgccctcgatccgccaacgccagacctgcagctgcaggccgagcgcggccagcagcactgccgccaacgcgaggccgattgccaggcgtggcgcttgccgacccgcaccgggcagcggcagtgaccaccccggcagagggccacatgcctgccgttccttcatgacggcggtggccggcaggctgtccggccacgccggcggtacgctgccgatccattgcacggcctgcacgccggcctgtcgcaggcgcacggccagcgcctgcatgactgcacacgcatcacgtccgccataccactggacgaacccccgatcgcgcccgcttcgcaccagcaggtgctcgccgctgacctgcagcgtggcctgtccgtcctgccagggcagcagcaggggcgtcggatggagtgcctgcagctgcagtccgcacgaagccagcaactgctgcgcctgcaggaccgcctgctggccgagccaggccaccggaaccgtgccgtcagccgcctgcgcaccgtgggccagcgcgacgtcctgcaggtcatccagcaacatcgcctccacctcaccctgcaacgccaactgcaggcggcgcccggacaacggtggcagctgcagttccagcaggatcaggtcgctcggatcgaggcaggcatgcaccgcagcccgcggatgccgcagacccagcgccgccagcgtggcgcaaccgtgggccagcacctcgcccttgtgcagctgcgcccagtccaccgcgctgtcggcgtgcagaccctcaagcgtcggcaggcgcacccgaagctgcccgttcatgcgccgatcctcgtccacacgcgttgcacacgcacgccatcgtcgcggtactcgcgccagagcagcgcgcggaaatcaaccgcgctgccgtcagcctgcacccggccgacagccaggaaccactcgctatggatacccaagggaagtaccgccatctgttcgttgctcagttggagtcggttggcgatgtcgccgcgattgagcagccaatggccagcgtcgcgctcaccgagcagcgcctgcaggcgtgccggctcgaccgcaggcgtcaccgcctgcagaacgcgcaggtcgctggtgttggcgttgaccagggtctgtgccggcaacaccacggtgcgtcgcgccagcgcctgcaatgccaccggatcggcgcccggcagcgcctgttcgatcagtgattcgcgcggcagcggtgcctgcgcctgcatgtcgccatcgcgcatgcgcgcctggatgtggtccgcggcggatgcgcaggcgccctggcccagcccctgcccggcacacaacgcgatgaacgcgcgccgcgcctcggggtccggcctgccatgcgcaagcagattgcgcaggttgaacatcgactgcgcatcgaccagctgcagctgcaccggcaacggcgcctgcagctccaatgggcgcgcccagcgcccgctgcgcaccgtggtcagctgttcctttgcatcctcacgcagctgctgcgccgcacgttccagcgttgcgtccacggccatgcgtacctgtgcgcgcagctggtcaccacgcagcccgcgcagctgggccgactgccgggtgagcagtgcagtggcaatcactgccaccagtgccaccaccagcagggcgacgatcaccgccatgccacgttgacggacactcgaaacagaccgcatccgggctgacatcggcctgcctcacagctgccacgagccgatgtccgcgttcccggcgtcgccaccgggcttgctgtccgcacccagcgagaacacatcgatgtcgccatgtgtgccaggcacctgatattggtacggatggccccacgggtcgttcggcaggcgatccagatagggcgtgaccggcatcgcgccactgccctgcggcggcttcaccagcgcctgcaggccctgctcggcgctgggatagcgaccattgtccagcttgaacaacttcagcgcctgcatcagcgccgcgatgtcctggcgcgccgccaccacgcgcgcctggtcgggacggtccatcaagcgcggcacgatcaatgccgcgagaatgccgatgatcaccaccaccaccatgatctcgatcaggctgaaaccctgctgccgagccctgcgaccacccacctgccttgccattgttccgccctcgtcatcctggaagagaccgctgcgccatggtcagcggtgcatgtgtcagtacgataaacatccgccggcaattcgctgcgcatgtgcctgcgcaggcgccggcgcagccggtacgcgtgccgcctcgagcaggtgtggcggcacactggacagcgtttcgtcgatgcagccgcgcagcagcggaagcgcgcacgcctgcaacaggcgcacgcactgcatcggcgaccacgcggtgccatggtcgaggccgatgaacgtgcggtaggcctggtgatagcgcagatcgtcgtacacgcgctgcgcactgttgagatcacgcacgaccaccagcagggccgcacgttgcagcagccgcgcatcgcctgcgtcaagcggcagcgcgttcatggctgcttcggaccacggccgcagctgcagatcaagggcgcgccgcagcgccgccaatggatgcgcgctgctgtccagtgccgcccagcgcgccgcatcggcccaggcatcactggacagcacccagacccacgagtgcccgtagcgttgcacattcaagggcgtgtgccgcgcctgctccagcgaccggctcaggtggcgatccagctccagcatgctgatcctgcgactgtctgccatctgcgtcgcccgtgctccgcgacgcgtggtgcgtcgtactctggagaagacgtcagcaaggcaggtgaagcgacagcgcgaatgccgctctgtgcgctgggtggtgcttcatcggcaacgtcatcgcagcgtcatccgcctgcaggcttcgcgcagcaggcgcggtgcgtcacccccgcagcggcgggccagtaccgccacgtcgctgcgcgcggcgaacgcgaccagcgcgtcggtcatgtccacgtcatcgcaccacgacgccatcgcaatgcgcaccgcgggcagctgccagccgtccatcaccccgcgggtgcccgccacgaaccagtgccacagccggtggtgcagcacctgctcgtgcagctgcgcgagatccttgatgccatgcatgtccatcagcagcagtgcgcgtgccagcgccgcaggcggcaacacaccggtttcagccagcggcagcacctgctgctgcaggcgcaacagcatcgccagcgggtgcgactgcggatcgaagtccagcagcacggcctgttgctgccactgtgcgtccgataccacgcatacccatggcgagccgtagcggtgcaccatcaacggccgtcgctgggtggtttccagcaacgccgacagattgcggcgcagatccagcacaccgatggtctcgttgcgcatccttggcgtctccttgcttgcaacagccctgcgcggcgcgcacggccagcgtcttcacctaaccaaggacggcaatgccacctggaaagcgacgcagatccagcgacatcgtcagtcgcagctgctccagcgccgcatccggatcatcgatgcggaagcggccgctgaccggggcgcgcgccaatgccgattcacccagcagcaccttgccgcggcggtagcggttgatctcctccaccacctcgcgcagcggcgcccggcggaacaccagcatgccttcggtccaggcactcacttccgaggccacggcttcggccaccacgccactgaggcgctcgtcgtaccgggtctgctggcccgcctgcagctgcaggcggccctgcgggtgctcgatccgggcgctgccctgcaggcaggtcacccgtacctggccgtgggtgttgcgcacgtccaggcgcaccgccccttcatcggcaatcacgcagcccgcccctgcgaacagggccaggcgcaggccggcccgggtctcgatcgcggcctggccctgcaccagctcgaagccttcgccctccgtgtccgcacggcggcgcaggctgctctgcgtatccagctcgatcttcagctgtggcgaaggtgcgatctgcagccgttcaccggtaccggtgtggaaatcggccgtcatcgccgtcaccgagggccacagccccagcggcggacggatcgccgccaccactgccaggctggccggggcggcaatcgcggcgcccaggaaggcacgccggctccagcgctgggtcggcgtcggcgcgaccggttggcgtgcggcggcaggcagctgctcgccggccaggcgtacctgctcccattgccggcgcgcacggccgaatgcttcgcgatgacggggatcagcctcgcaccacgcgcggaagctgcgcccgtcggccgcggtagcctcgcccgaggtcagccgcaccagccacgcgtgcgcctggcgctcgacggcatccagcgggcgttgcgggtgatcgtcaggatccatgggggctcatgccgcacccgcacgctgcggggttctgctcggcgtcaaagtgtagacggatgccgccgctcagaaccgcacctggcgcccctgcccgctgcgctcggccaggtagtcctgggccgccttcagctcacgctgcaccagccgcagcgacacgccgaggtgatcggcgacgtcacgctgctgcaggccatcgacgcggattgccagcaggatgcggcgacgccgctcgggcatgcgctgcagcaggcccaccatgtcctccagcgcgaagtccagttcggccgcctgcgccggccccggtgccgggtcggccatgtccatcagcgtctccacctcttccaggctcagcaggcgatggtcggcacgttggcggtcgatcacggtattcatcgccatgcgcagcaggtaggccgcagggttctgcacggcgtccaggcggtcacggcgcgcactcaggcgcatccaggtgtcctgcagcgcgtcaccggccagctcctccgatcccagcttgcgcaccaaccggcgcttcagctcgtcgtaggcccccagaaggtggtccatcaggtcaactgcgccagccgtaccgttgctcatgttcgaatccttgaagtcatggaaggggcgcgcgcccgccacagtcgtggtcggtaccggaaggacggatctgcagggtcaccggctgcgccagcgcggcggcctcggtcgccagcaccaggccctgcagcgcctgcagcaggcgtgcatcgcggcgggcactaccactgccggacagcagctcgggctcgctcacccggcccgcgccgtcgatgcggaagcgcagcgtcgcggcgtagcggccgggcgcgatctccgggtcgtcacagaacgccgcacgcagccgctgctgcagcccgccatagcgacgccgacgttcggcctcgggaagttcggcaccaacacggggttcggcggccgaggacgtgccccggcgcagcaccacgcgctgcgcgccgatcacctcgacctcgatgccggagtcctgcaacagcacctgcaaggcaggcagcggctccaggctggcgcgcagcgcatggctgctgcggcccgcggccaggtcgcccgggtacatcaccgaccacccactgatgacgctgaagcgctcgaccgcctgttccagcggttgcgcagggatgtcgtaggcatgaactccgtcctgcccggcagcggcaaaggacagcagcagccacgcgacgatggccaccttccaagttctgaccgcatggtgtccattcagccccctgacgtagaacacatgaccctcggcagcgacagcagctgcagtggacgcgcaccacgaccggaaccccggcccgcgcgcgacccgcaagcgggctcaaaccgtagcggggccacatgtcattgcgatgaccgccgcctacggccgacgtgaagccagtcacccatcaggaatcaataaatcgaacagaccacctcatccacgcctggggtcagagcccgttgcgaagcaacgggctccgaccccgtgccggcccaaacgtgtcgaccaaggtcgacacccaccaagagcagttcatgccgttccggcagattgcggggaactgtcgaaggcggggtgggtctggttgcaggggtgtccgcggcatggatgccgcggccaagcccccatggaagggtctacggcgtcccctgcaaccggacccaccccgccatccaacggaatgcacgctgttgcttcggctgttgcttctggggttgccggccagcggccggcactacctgcgggtgccgggcgccacccgggcggaaacccccgcccttcacagcggcagctgggtcgtctgcttgatccgctgcatcggaatctcggtcttggtgttctgcaccccggcgatccggttcaggtgctgcatctggaactgccggtaggcatcaaggtcggccaccgccacccgcagcaggaaatcgcagtcaccggccatcagatggcattcaagcacttccgggaacgacttgatgctgttgatgaagtgattggtggtgtcctcgtcctgcccgcgcagccacacgcggacgaataccgtgaagccacggcccaccttggcctcgttcaacaaggccacgtagcggtcgatgtagccgccttcctccagcagccgcacccgacgcaggcaggccgacggcgacagcccgaccagccgggcaagctccaggttctgcaggcggccgtcgcgctgcagggcgtcgaggatacgccgatcgaggttgtcgagctgatactgcatgggatttcgcccttgtcacttttggccgcatgaaatatcaatcatccagaatccagtggcatcaacgcaacccaatttcgcgatcggaccgctagcatgggccacccccacctcgttgtgccgttccatggacgcccgtaccaccctccccctgcccgacacctgcgataccgcgccgcgtgccgaattcctgcgcggcctgcgcgccgccgtgccggtgatgatcggtttcattcccttcgccctggtgctcggcgcgcaggccgcccagaaaggcctgagcgtactggaagtgccactgatgacgggcctcaacttcgctggcggctcggagttcgccgccgtcgaactgtggacctcgccaccgcacatcgcactgatcgtggcgatcaccgcactggtcaacagccgccatctgctgatgggcgccagcctggccccactgctgcagcacctgccgcgccgccgggtgctgccggccctgttcttcatgtgcgacgaaagctgggcgatgggcgtggccgatgcgcgccgccgtgcgctcggcttcagcctggcctattacctgggcgtctccgcgggcctctacaccgtctgggtggcctgcaccgcgctgggtgcgatcgtcgggccgctgctgggcgacatccacgcctacggcttcgacatggccttccccgccgtgttcctggtgctgctgcgcggcatgtggcagggcatgaaggccgcgcgcccgtggctggtcagcctggtcgtggccgccggcacctatctgctgatcccgggtgcgtggtacgtggccagcggcgcattggccggcctggccgccgcctggctgctggcggaggacgcagcatgatcttcaacggcctgatccactggtcctcggtgctgaccatcgtgctgatggccgccgccacctacctgacccgcatcgtcggcttcctcgcgctgcgcaaccgcacgctgggcaagcgcgcggtgacggtgatggaagccgcgccgggctgcgtgttgatctcggtgatcgctccggatttcgtcgccgacaagcccgccgacctggccgcgctggcgatcaccctgctggccgccacgcggctgtcgatgctgccgacggtgctgatcggcgtggcctcggccgggctgctgcgctacctgatgggctgactgcggtgcgccgggcaaaggcccggcgctggccagtcatcgcagcaccgcctgtacgcgcgctgccgtcaggcgctgctgctggccgcaagcaggcacaggctgcgcggcggcagggtccaggcacctgcttcatccggctccaacggcgtttcgtcggtctgcagcagtacgcgccggaacgacaaggcttcatccgacacactgaaccgctgcggctggtctccggcgttcaacagcagggccaggctgacatgccgcccgggctcgcgcaggccgctgtccgggctgcggccgtccagcacgatcagcagcgcacgcagccctgcgtcatgccagtccgcttcctccatgctgcggccgtcaggatgccgccagtcgatatcgcgcaggcccagcgcttcatcgtattcgccgcgcaggaaccggttcctgcgcagcaggccatagcgtcggcgcagcgacagcgcccggcgtacgaacgccacctgcgcctgtgcagccggcgatgccgcacgctcccagtcgatccagctcagcgggttgtcctggcagtaggcgttgttgttgccctgctgcgaatggccgaactcatcgccggccagcagcatcggcgtgccctgcgcgaacagcagcgtggccagcaggttgcgcatctgccgcgcacgcaacgagaggatcgccgcatcatcggtgtcgccctccacaccgtggttgctggagaggttgtgcgagtggccatcgcggttgtcttcgccgttggcctcgttgtggcgatcgttgtagctcaccagatcgtgcagggtgaacccatcgtgcgccgtcaccaggttgatgctggccgagggccgcctgccatgatgttcgaacaggtcggccgagccggtgaagcgcgtggcgaattccggcaactggccgccatcgccgcgccagagcgcgcgcaccgtatcgcggaagcggtcgttccattccgcccagcccggcgggaactggcccagttgatagccgcccgggccgatgtcccatggctcggcaatcagcttcacctggctcaggatcgggtcctggcgtaccgcatcaaggaaactgcccgaggcatcgaagccatgccgctcgcggccaaggatggtggccaggtcgaaacggaacccatccacccgcatctcggtcacccagtagcgcagcgagtccatcaccatgcgcagcgcgccggcattggtcaggtcgaacgtgttgccggtgccggtatcgttgatgtaatagcggcgatcatcggccaggcggtagtagctggcattgtcgatgcccttgaaggacagcgtagggcccagctcattgccttcggcggtgtggttgtagaccacgtccaggatcacttcgatgccggcactgtgcagccgcgcgaccatctgcttgaactcggccacggtgcccagcgacaggtagcgtggctgcggcgcgaagaagccgatggtgttgtacccccagtagttgcgcagcccgcgctcgagcagctgctggtcatccacgtaggcatgcaccggcagcagctcgatggcggtcacccccagatggctgaggtggtcgaccaccgcgtcgtggcgcagggcagagaaagtgccgcgctcggcctgcggaacatcggggtgctgcatggtcagtccgcgcacgtgcgcttcgtagatcacggtccggtcccagggcgttgcgggtgcacgttcgacaccccagctgaaggccggatcgatcaccgcgcagcgtggcatgtagctggcgctgtcgcggcggtcgaaactgagatcgccatcgcggtggcccagggtgtagccgaacaggtgcggcgcccacttcagctcgccgacgatctgcttggcgtaggggtccagcaacagtttgttgggattgaagcgatgcccctcctccggcgcatacgggccgtgcacccgatagccatagcgttgcccgggccgcacgtccggcaggtagccgtgccagatctcgttggtgtactcaggcaggacgatgcgctcgacttcacggttgcgcgcgtcgaacaggcacagctccacccgggtggcatgccgcgagtacagcgcaaagttcacgcccagcccgtcccacgtcgcgcccagcgggaacggccggccttcgcgcacgcgcgaggtctgcgtccacttacggctggccatcggtgccctcctcgccgcgcgccgcggcaatctcggcctccaccaggcgctcggccatgtgccagtgccgctgctgctgatcgtccgggcgcccctccgcttcccagatctggtgggccaatgcctcaatccgctgccgtcgttccctgctgtccatccctacctgtctcctcgttgatccatatcgccagcgggctgccagccagaagcctgcccacgtccgcggttgcgttgaaatgttcgatgcgcccgtccaggaggttgcgcatggggcctgtcggcacaccgtgcagtgctacgccggtgccgacgtcgtgcgcggcgtgcaggctgggcccaggcacggcggcgggcgaaccccggcgcacgatcaccagcagcacctgcgcctgatgcctgcgcgtgaacgccagccacggcgagcgcgcaggcgcggacagcggctgcagctggccatgcaggaacaggtgcgggtgcctgcggcggcactccagcaattgccgcagcaggaatgccttgatgccaccgtcccgccagtcttccagcagcgcgggccacccgcgcgtatcgcgcagccacgcctgccgcgttggatagtccacggcacgccggttgtccgggtccaccaggctcaggtcccagccttccccaccctggtagaggtcgggcacgccgggcaggcagtgctgcaggcacagctgcgccaggccgttgcaggcgccggccggcgcgatgcgcgccacgaacgtcgccagcgcctcgcgcaccggctgcaagggcgctgcgtccagcagcgcgtgcagccactgcgcggcggcctcctccacggccacatccgggtctgaccagctgctgacccgcttgccctcgcgcaatgccttggtcagccattgcaccatcctcgaggcgaagtcggcgccaggggcaccgtgcatcggccatgcggccacgagcgcctgccacagtgcgtaggcctcggcacccggcaatggcatcggcgcgccggcgcgggtcaacatccggttccagcgccgcacagcgtcccgccattcgaacgtgcaggtactgagaaccgccagccttgcccggctgtcggcgccgcgcttgtgatcgtgggtcgcaagcgcaagcaacgccctgggatggcgacgcaggcgcgcggcggcgtgttccagcagcgcgcgcccctccatgcccagccgctgcggatcactgccgacgtcgttgcgcgagagcagcctgaaatagcgatagaacccggtgtcttccaccgacttggcattcaacggcgcggccagttgaccgaaacgcgcacgcagcacgcgctcggcctgcgcctcgccggcaagcgctgccagcaacaggtccagcgccgcgcgtgcggcaccgtccagtgcctggcgcgctgcggcggaagcgtccgccagcgcctttagttcacccgccccctgcagcgaatagggccggtaggtgcggtaatgccccagcacggaagccaatgcgcgggccagcgcagccactccgatatcggcttcggccatccgcggctgcaggacctgctgcgcgctgcgcagcagccgctggaagtcggcatgaaggccctggcgcagcaacatggcgcgggcgtcctgctggatccggtcgaagctgcgcgggtcaccgcccagcgcctgccacgtgcgcgagagcgcgggtgcagccgccggatcgtgcaaccaggcaccggcctggtccatgaagtcatagccggtggtgccgtcgcaggcccagccgtcgggcagctgctcgccctcggccagtatcttctccacatgcaggctgacggtctgcgggtcacgaccgccggccgcgcaggcggcgtcgagcgattcacgcaggcgctgcaggtacgcgcccgggcaggacaggccatccacgtggtcgatgcgcaggccgtccacccatccctcgcgtaccagccgcagcggcagcgcatgcactgcctcgaacacatcctcgcgctccacccgcagcgcggccagttcgttgatatcgaaaaagcgccggtagttcacctgatcgccggccgtgcgccaccaggccagacggtagtgctgccgctgcagcagcgtgtgcaaccgttcaacgctgcggttgcagcgttcggcccacgccggccactgcgcgggttccagcggatggctgcgcggcgacaacggcaatgccaggccatggtggcgcagcacgggccgcgcgttgtccaccaccacgcgcaccacgccgtcgcgtaccgcgtcgtgcaacggccggtccagtaccggcagccagagccggccctcgcagcccggcgcctcccagtcgatgtcaaaccatgctgcgtgcgggcttcgaggcccgtgcatcagcacatcgctccaccactggctgtgcggggacgccgccagatggttgggcacgatgtccaggatcaggcccatgccgtgcgcgcgcgtcacttccgccagctgccggaagcccgcttcaccgcccagttccggattgatgcgagccgggtcgatgccatcgtagccatgcgtcgacccgggcaccgccgcagcgatcggtgacaggtaaaggtggctgacgcccagcgcggcgtagtacggcacctgcgcggcagccgccccgaggtcgaagcctgcgtgcagctgcaggcgcgcggtggcacgcaaccccgtcattgcccggccctgcggcgcgtgacgctcaggcgcgccacgcgcgcatcggccgcgtcagcatcccacgtcggcggcaggcggcggcgccagttgggatggccgccgacggtgcctggcaggttcacctgtgcgcgaccgcccagcgcgtcttccagcggcagcaacgccagccgggacgccgcgtgggcgaccagagacaacgccctggcgtccagcggcgcgccctcgccgccaaccaccgcagacagtgcctgcgcgtcgctggcacgcgcgcgcagtgccgctggcagatccgccagctcacccaggcgtgcgcgccagcgcaggtcacgcccgcgcagccaaccggccagcggtggcaggtcatgggtggagggcatggccactgcatcgcggcgccactgcggcgccggcaggaagcgcgcgccgttgcgggcgaacggcagcacctcgatgcccagaatgccccgggctgccagccgctggcgcatgcccggcggaaccacgcccaggtcttcgccgatcagcacgcagcgatgccgccaggactccagcaccagcaggttgatcagatcatcgaaaggatagcgcaggtacacgccctgcccggcgcccgcgccacggggcaacacccacagccgcagcaggcccaggatgtgatcgatgcgcaggcctccgcggccggccatcacggcgcgcagcacgcgaaggtagggtgcgaagccctcgcgctgcaacgccatcggtgaccagctggtgatgccccaggcctggccgagcggattgaacgcgtccggcggcgcccccagctcaagtccctgcagcagatcagcacccccggtgcgtgcctccacgccctgcggcgcgcagcccacggccaggtcggcaatcaacccgatcgaagcgccctcgtcgcgcagcgtggcgtgtacctgcgcccagccctgctgtgccaaccactgcgcaaacgcatggtcgtccgcgctgccggtgaaccggtcggcggcatgctggcaatagtgccgcagcggatcgccctgcatggcacgccaggtttcgatctgcgcgtgctgcgacggtgcctgcgctgcaatccattggcgaacctgccgtatccagcgccacttcactgccgccgagtgcggccagtcgatgcgacgtgcggcagtccccgcttccaccgccgccgccagcgcctcgtccccgcccagcacgctgttggcggcatcgggcaatacctgcggcagggagacctgcagcgggtcgagccagcgccggtcgctgggcgaataggggctgtagcctgggcccggtggcatgcccgcgtgcagcgggctcaacgccagtgcgtcgccgctgtgccggtgcagcagctcgctccatcgtgcacagccggcactgtcaccgatgccggcatcaccgggcgcgcgcaggctgtagacctgcgccgacaggccccagccgcgcagcgtgccccgcggccaccaggcacgctgtggcgccaccgcaaccgcctgttgctggtcgccccggcgccactgccagtagcccggctggtccggcacgcgccagcggccctgcgcatcggcacgggcgggcaacgctgcgccctgctcatccacccagcacgctgcaccggctgcctccggcatcaccagcagctgtccgcagcaggccgtgcgcaggccagcgtgctcgggcaccgcctcgcactgcagcccctccagcacggcgcgcagcacgtccggtgcgacctcgcgcgcggcaccggccacgtcggtccagcggaccagcaggcccgcacggcgggccgtctcccgcaccgctgcatccgtattcatgcggcgacccagcaggccagcacgccgccgcctgccggcagcatcccggcagcgtccggccccacgacgcactcgccggccggcaccgcatgcgccaccggcacagggcccacgttgatcgcgatccaccattggcccgatggcaactgccagcccgcctgcaccgcgccttggcccagcacgcgcgcgcccagcgaccgcgcctgcagcaggcccggctgcagatagcgcctgcgcaggccgaggaactcacccgtgcagcgcagccagtgctgcgaccagggaccatcgccgggcggcggcgtgtacgacgcctgcagggtcgccgcatcgttcgggtccggaatacgcgctcgcgcggcggcgtcggcaaaggcgctgaaaccagcgaactcacggcgacgcccttcgcgcaccgcctcgtccagcggcggcgcgtagtcggtgaagaacaggaagggcgattgcgcctgccacggctcgcccatgaacagcagcgggatcatcggcgtcagcagggtcagcgccagcgccgcgcgcagcggcgcaggatcggtcagcatcgacaggcgctcgccgaaagcgcggttgcccacctggtcatggttctgcgcgaataccacaaaacgcgcgggcgacaggtcggcgctgggttcgccgcgggggtcgccgcgcaggtccggttcaccctgccaggcgaatccctcggccaggcagcgcgccagcagtgcttcggcgcgaccggcataggccgcgtaatagccttcctgctcgccggtcagcatcacgtgcagcgcattgtggaagtcatcgttccactgcccctggtaggcgccgcgcagccaccgcgcctggttgcgctcgttctccagcaccaggtgcgcgtgcggggccaccgcacgtacctcatcggccagctgctgcaggaaacggtcatcgtcaatggcgtgcaccgcgtccaggcgcaggccatcgaagccgtagtcgcgcaaccacatcagcgcgttgtcgatgaaaaagcgccgcacccagggctggcagaagtcgatggcctcgccccacggcgtgctgcggtcgtcacggaagaacccgcgcgcgtagtcgcgcaggtggttgccctggggtccgaagtggttgtagaccacatccagcagcaccgacagccctgcatcgtgcgccgcttcgatgaaggccctcagcgctgccggcccgccataggcatgggccggcgcatacgggaacacgccgtcgtagccccagttgcgctggccgggaaactgcgcgaccggcatcagttcaatggcggtgatgcccagcgcggccagcatcggcagttgcgcggtcaacgccgcgaagccgcccccggcctcgatatgcacctcatagatcaccaggtcctgccaggcatgcccctgccaggcaggccgtgctgcctccgtatccagcaccaccgcgctgtcgccgtcgatgccgtccggctgccagcgcgaggccgggtcgggcacgtcctggccagaaggcaggcggaaccggtagcggtcgccatgcgatgccggtactcgcagccagtggcagccgtccgggtcgcgctgcatcggccgctgggtgccttgcaggcacagcgccatcgtccttgcgcccggtgcccacacgcggaactccaccccgtcaccggccaccggccaagcgcccaggcgcggggccactgtggtcatgcatcaacctgcaggtagagcgtggacagcggcggcagcgtgagccgcagcgactgcgcgtggccgtgcatcggcctcggctcggtatgcactgcgccgaggtttcccgcattgctgccaccgtaatacgcgctgtcggtgttgagccgttcgctccagcgccccggttgcggcaccccgacccggtagccgtcgcgacgcagcggggtgaagttgctcaccaccagcagggtgcggccgctgccggcaggatcccggcggatgaaggcgtagacgctgttgcgactgtcgtccgccacgctccagtcgaagccgcgttcgtcgcgttcgtcgcgatgcaacgcaggttcggcgcggagcacgttattgaggtcgcccaccaggcgcgacaggccctggccctcgttgctggccgcccgtgcccagtccagtgccgcatcgtgcgaccactcatggccctggccgaactcgccgcccatgaacagcagtttgctgcccgggtgcgcccacatgaagccgtaatacgcgcgcagctgggccagccgctgtgccggctcgcccgccatcttggccagcagcgcgcccttgccatgcaccacctcgtcgtgggacagcggcagcacgaaccgttcggagaaggcgtagaccaggccgaagctgatctggctgtggtgatgcgaacgatggaccggatcgcggcccaggtactgcagggtgtcgtgcatccagcccatgttccacttgtgggtgaagccaagcccgccctcctccaccggcgctgtcacccccggccacgcggtggattcctcggcgatcaccagcacgtccgggaagcgctcccgcagcgtctggttcatccgccgcaggaaagcgaccgcctgcaggttctcgcgcccgccctgctcgttgggtacccactccccctcggcacggctgtaatcccggtacagcatcgacgctacggcgtccacgcgcagaccgtcgacatggaagcgctccacccactccaacgcactgccgatcaggtaggcggccacttcgttgcggccgtagttgtagatcagcgtgtcccagtcggcgtgcaccccttcgcgcgggtcggcatgctcgtacagcgcggtgccatcgaacccggccaggccatgcgcatcgttggggaagtgcgcgctcacccagtccacgatcactcccacgccggcctggtgacagcggtccacgaagcgtgcgaaggcctgtggcgtgccatggcgtgccgtcggcgcgtagatccccagcggctgatagccccaggaaccgccgaagggatgctcgctcaccggcaacagctcgatatgggtgaagccaagaccggccacgtacggaatcaaacggtcggccagggcatcccagtccagcggcgcaccatcgtcgctgcgctgccaggaaccggcatgcacttcgtagatcgacagcggcgcgcaggttccggccaggcggcgggccgccaaccaagcatcatcgtgccactccattggcccagccgaaggcacccgcgatgcggtcgccggtggcagctcggcccagcgcgccatcggatcgaacttgtcgggcatcacccggccgtcggcgccgacgatgcggaatttgtagcgggcaccggcctgcacgcccggcaggaacagctcccacacgccggcggtgtgacgcagccgcatcggatggcgtcggccgtcccacccgttgaaatcgccaaccacggcgacccgctgggcattgggcgcccacaccgcgaagcgcacgcccgcaatgccctgcacctgcatcggcaccgcacccagctgccgcgccgcatcggcatcaccggcatggaaccgctgcagcagggcttcgtccaacagtggaccgaacgcataggcatcgtgcacctgctccacgccctgttcgaaatgcagggcaagcagcggtatcgccgcgtcaccggccgcgccctcgaacaggccgggcaacgggccaggggacaggttccagcgccgcccatcgtctgcaatcacctcgacgcgctgcgcatgcggcaccagcacgcgcagctggcgtccgccttctggctggcgatgcgggcccagccaggcgaatgcatcggccgggcgcgcgtggacgaggtcctgcagcgccggggcgatacgctgatccaatcccgtctccgtgatcgcttcatcctccagggcggccagatgcaggctgtcgtggctcatgcggccacctggcaggtctgctggtacagggccagatacgcgcgaccggccgcatcccagccacccggccgcagcatggcggcgcggcgcatggcctgcagcaggccggccaggcggaaggtgcgcatcgcccgttccacgcagcggcgcaggccatcggcattggcgccgtggaacaggaatccggtcacgccatcctcgacggtatccaccagcccgccggtcgcgtgtgcgatgggcaggcagccgaagcgctgcgcgtacatctggctcagcccgcagggttcgaagcgtgaaggcatcagcaggaagtcggcgccggcaaacatctggcgggccagcgcctcttcgaagccgatgaatgcgcccacccgtccggggtagcgccgggccagcgcctgcacctgcgcttccacctgcggctcgccgccgccgatgatgaccagctggccgccggccgccacgatctgcggtgccacatcgcaggtgatgtccaggcctttctggtgcaccaggcgggagaccaccgcgaacagcgggccggtcgacggcgccagcccgaacgccttgcgcaccgcatgcgcgttggtggcgcgcccggtccattcgccgatgccgaaatgggccttgaggtggatgtcgcggcgtggatcccagctggcgtcgatgccgttgacgatgccactcaggtgtccgccggccgcccggcgcgccaacaggtcatgcagcccgcagccgtcatccggggcggtgatctgctgcgcgtagcgcaggctgaccgtgttcagccgcgtggcattggtgatgccgccctgcaggaacgacatctgcccgtggaagtgcagttcatccaggtgttcggccggcacgcccagcaccggcgcaagcgcgtagggaaacagcccctgataggccaggttgtggatggtcagcagggtcggcacggctgtccggtcccagcgtacgtaggcggcagccatggccaccggccagtcattcaggtgcagcagctgcggcgcccagtccagcccggcgcgcccggccgcaatctccgcagccgcatgcgaaagcgtggcgaagcggaccgcgttgtctttccactcctgtccctgcccatccacgtagggcgagccctcgcgctcgtacagcccaggcgacagcagcacgtagataggaaggccgtcggcctgcaccgccatgccgatcgtgcacgcgggcaacccggctcgggcgctgacccgccccaccggtcgcagctgtggcaggcgctgcagaacctccgggtagccgggcagcagcacgcgcgaatcacatgcaccgcgcaccgcacgcggcaacgccgcggccacatcgcccagtccgccggccttgatgaagtcggccatctcggtggcgacgaacagcacgcgctgcaccagttctgggagatccaacggttgcgagtggccgcggcgagtgccgatcggcacgggcgtgagcggagagatcgcaacgggtgaagcggactgggcggcgcgggccatggggatgatctcggatgcttcaggcagacagacgccagcggcgcccggacgggcgcttgtgctgggaaggaagtcgacgcaggacgtgggggacgtcagcgagaggctcaggacgacaatagccctccatgcgatcaatcaaccgtgaagccatggcgatttctttgtgacaaggcgtcatgagctcagtacacatgacaggcgcccgcctcctgcccgtgtctctcatgtagagccgagcccgcgcccggctgccggcaatcccgtttgccccgtgagccgagcatgggctcggctctacagagattcttcccgcgacacccggtcgcaggccatcgagcgacgcgcttgaccaatgtcaaaccgcccgccgccgcgcgggcgtatttctatgcaggacccgaacacgccggcactgccggcatccacaaggaccctgcgatgagctacacccccgacaacgcccagctgctgaacgccatgcagaacgtcatggtgatctccaccaccgacctgcagggcaacatcacctacgccaatgacctgttctgcacgctcaccggcttcgcccgcgaggaactgatcggccagccgcacagcatcgtgcgccacccggacgtgcccaaggccgtctacaaggacatgtgggacaccatcaaggccggcaagacctggaccggcatcgtgcccaaccttggcaaaggcggcgtgctctacgtggtcgacaccaccgtgcagccgctgttcgacgccgacggcaacatcacctcgtacatcagcatccgccgcgtggtgaacgacctgatgcagaactacgacctggtcgagttcagcaaggaaaagttcgacgacttctacgaggccgcgtgaacgctgtcccgaccagtacgcccttcagccgcctgctggtgggttttgcgtccgagtcgggcaacgcccgcgtcctggcccagcgcctgggcgcgggcctgcagctgcacgggccgcaggtactcccgttcaacgacatcgacgtggccagtctcggccaaggcgatgtgctgctggcaatctccagctcattcggcgatggcgaaccgccggccaatggcgagcagttcttcgaaacactgcgccagaccccgacgctgcgcggcctgcgctatgcggtgttcggccttggtgacaccggctaccccagcttctgcggcttcaccaaggcgctggatgctgcattgagcgagcgccaggcccagccgctgctgcatcgggtggacgccgacctgggctacgagcagttcttccagcaatggcagccggtgctgggccaggtgctggagggtgacctcagcgctggccagcacctgcacctgcaggtcaccgcctatggcgaagacaatgcctttgccgcgcgcatcctcgaacgccgccgcttgaacagcagcgacccggccgcgtggcacctgcaactggacattgccggcagtggcatggcctatcgcgcgggcgacaccctgcacgtagtacccgggaacgatcctgccctgctgcaggcgttggccacctggtacggcgacaccgccgccgtggccgccctgcacgaccgcgagctgcgcctgctgagcaagggcgtgctgcgcgaactggcccggctgggcggtagtgaggcactgaagggcctgctgaaggtcagccagaagcgcgagctggacgcctacctgcacggcctggacctgctggacgtgctgcaggaccacgccacgccggacagcgtgccgcttgcccggctgcgcgaactgctgtcaccgcggctgccgcgcgcctattcgatcgcctcgcacccgtgcgacgaccagctgagcctgtgcctgcgcgaagtgcgctacaccctgcgcggccgcgaacgcttcggcactgccaccggcagcctgctgcatggaggcgactatgcccgtgtgtactgccgctccaaccccggcttccacctgccggataccggcgaggcaccgctgctgctggtcggtaccggtaccggcatcgcacccttgatgggcctgctgcaggaactgcaggccaacgcctgcgaacgcgaagtgcacctggtgttcggcgagaagcaccgccagcacgactacctgtaccgtgaccagctgctggactggcgtacgcgtggcgtgctggccggcctgcataccgcgttctcgcgcgatggcgccgaaaagatctatgtgcagcatgtgctgcagcagcgcggcgatgaagtgcgcgatgtgctggcccgcggtgggcatctgtacctgtgcggcaacaagcgccacctggaaagcgcggtgcgcgaggccatcgatgccatcggcggcgaaggccactgggacacgctgcgcaatgagggccgcacgcactgtgagctgtactgatccgttgatcctgtagagccgagcccacgctcggctgctgttggcgttgtcgcgcagagcagccgagcatgggctcggctctacaggtgcaggtcaaccgtcgaccatgcggccatccaccacgcgcgccacctgctggccgaacatggccacatcctgcgggtcatggctgatcaacagcagcggaatgccggtcctgtccagcacggtctccagctcctggcgcaggtgctggcgcaggtcatggtccagcgcggaaaacggttcatccagcagcagcgcctgcggctgtgtcaccagcgcgcgcgccagcgcggtacgctggcgctgtccgccggaaatctgtgatggcagcagatcgcccaccgtgtcgatgcggaaggcgtgcaaccactgttccaccgcgtcgaagcgctggccgatccgcggattcagccatcccttctgcagcccgaacgccacgttctggcgcacgctcaggtgcgggaacaacgcgtaatcctggaacacgtagcccagccggcggcgctgcggcggcagattcacagcggtggccgcgtcgaacagggtctgcccctgcaggcgcacatggccctggcccggccgcagcagcccggccaccgccttcagggtcaggctcttgccggcgccggagggtccgaacagcaccacctgccgctgcgtgcactgcagcgatacgtccaacacgaaatcctggccggccgcctgcaggcgacgctgcacctgcaggtcaagccacatcacgcagctcccggcgacgtccgcccaccaaccgcgcagccagcaacaggatcacgatgcacaccaccgaggtcaggatcaccagcgcattggccttgccgtcctgaccggcctgcaccgcctcgtagatggcgatcgacaacgtctgcgtccggcccggaatgctgccggccaccatcaacgtcgcgccgaattcacccatcgcgcgtgcaaacgccagcaacaggccggcaagaatgccgcgccaggccagcggcagcgtgacgcggaagaacaccgccgcttcggacacacccagcgtccgcgcggcctgctccagctgtccgtccacttcctcgaacgccgcgcgtgccggcttgaacaccagcggcagcgaagccaccgccgccgcaatcaccgcagcctgccaggtgaacaccaggttgatgccgaaccacgactgcagccacgcgccgatcgggccgttgcgaccgatcagcaccagcaggtaataccccagcaccgttggtggcagcaccatcggcagggtcaacagcgaatccagcagctcacggccgggaaagcgccgacgcgccagcagcgcgcccagcgccacgcccagcaccaggttgatcgcggtggcccagccggccaccttcagcgacaaccccaatgcactccagtccagatccatgcgtcagggcttgccgaatccgtgccgggccaggatcgcctggccctgcgccgaacgcacaaaggcgacaaaccgcttggcctctgccggctgcgcgctggccctggtcaccgccagcggataggcgatgcgcccggacaccggtaccacgaaggcacggcgtacccggtccggcatcgcctgcgcgtcagtggcatagacgaagccggcatccacttcaccgcgcgccacgtaatccagcgactggcgcacgttctgcgtggtgatgatccggccctgcaccgacggccacaggccggccgcttccagcgcgcccttggcatatcggccgaccggcacgctgtccgggttgcccagtgcgatgcgttgcacgccggcaccgaccaggtccttcaagctgcgcggcgcggccctggcctgcggcggcgccaccacccacagcgcgttcaccgcgaacaccgcgcggctgccggccgccagcaggtcctgctgctgggcctggtccatggtggcttcatcggccgacgcgaacacatccaccggcgcgccgcggctgatctgctgcagcagtacgccagaggcggcgaagttgaaatcgaccttggttcccgggtgcgtcttctcataggccgcacccagttcgcggaagctctcggtcaggctcgacgccgccgacaccgtcaggtcggccgcccaggccggtaccgtggccagcaggcccagccacaacaatgccgctcgcttcatgcccagccccctgcctgatcagtccagtccggcgtcccgggctacggccagttccgccagccggtccgggtccagcaacagcatctcacgttggttcaccgcaatcacaccgtcgtcgctcaagcggcgcagtacccggctcaccgtctccggcgccatccgcaggtagttggcgatctcggtgcgggccatgctcaggttgaaacgggtggcggagaatccgcgccgggcatagcgctcggaaagatccagcaggaacgccgccatgcgctcctcggtgcgatggttggcggccagcgtggcgaccttgccgatctcggcgctgagcaggctgaacagccgcgcctgcaaccccggcatgcgcgtggccagcaggctcaatcgcggaaacgagatccggcacaggtagacggtgtccagggccacggcgttgcaagggaagcgcgcgccgtggatggcattgagcccgatcacctcgcccggcaggctgaaacccagcacctgctcgttgccctggctgtcatcgacgaacgtcttgaccatgccggcacgcaccgcggcgatcgagtcgaatggatcgccggcacggaacaggtagtcgccggcctggaacgggccgacgtggtcgaccagcacatgcaattcgcccagcgcggtcttgtcgtagccctgcgacatgcaggcgtcggagaacgcacaggtgctgcagaagtgcagcgcgtctccgtcatcggctgctgccggattgggcgtggccggccgggacgcagagggagcggaggggttcagaggcattgcagcgaggcaggaacgaaggccctcatcatacgacagcgcaccgcccggccctgcgcaacgtgcacctactctggcgcgggttcggaacgccgctgcgggccacgctgccgcatgctgtcgcgcacgtccacgtcgaactgcagctgcagcatgctgtcgtcatccaacgcgataccgaagcccagcccatcccggcagggcagcctgcccgccagcgactcaacggcctggcgaggcagtaccaaccggcagaatgtcccgccatcgagcagcaccgcctgatcgccggcatgcagcgacagcgccacgccccagccaccactgccaccaaagcgcgtcaggttctccactgattcgccggccagcaatcctgccagttcttcttcatccacgcgcaggcgcatcgattgctgttgcagctggaccttcatgctgtgatggactcccattccgacggggtattgcagttgagcagcaacgcctgatcctccggcgccaatggcagccggattacgcccaggcgttgctgcagggcgcgcagtgaacgacgcgccgtcggatcctcaatcagctcctgcagcacgcggcggcaatgatcatcgatccgcaaccgcatcggcaacggttcatcgtcgaataccgtgcagtcacgcccttgatcggcctgcagccgctgcaacagcgcgggtgtcacccgcggcgtatcgaccggcaccacccaggcggggccgtctggcatctgcatcgccacactgtagaggccgcccagcgggccgcagcgtgcgacccggtccgggatgccaccaaaagctgggtagtcgccgctcacccataccctcccggcgccggcctgcagcagcaggccgcgcatgtgttccagcagcgtgcggcggtgccagggcagcagcgccttgtcgcggcccatccggctggacaggccgccggccagcacgatgccatcaatggggatgttcgtgatcgtgcgcatggtcatggccgggttcgctgtccgcatggcacaggctgcaaccttcgctccactggctgtcgccgtcctcgtaatgctcctgcttccagatcgggcactggtgcttgaccacctcgatcaactgccggcaggcccggaacgcctcgtcacggtgcgggctgccggcggccaccaccaccgccacatcaccgatgccgagccggcccttggcatgcgccacatacagcttcagcttcggaccgaacgtggcttcgacctcggcggccaggcgcttgaattcgttcagcaccagcggttcgaacagatcgtaggtgatcccggtcacccgccggcccacgttgacgtcgcgcaccttgccgatgaacacatcgatgccgccgaagcccgtatcggaaaccgccgcgatgccctcggccggatcgattgccgcctgcgcgcggtccacgaccttggcgatgatcgtctcgctcatcgctcagcccccgctcaccggcggcaggatcgccacccggccatcgtcgggcagcgcctcgtggtcgcgcagcacgcgttgctgatcggcgaatgccgagtagtccagcaggcccgcgcggaaacccggccaacgcagcggcagcagctcgcgcagcgcctggcgcagatcggccacggtgccaccggctacatccacggcgatctcgcggctggcatccagatcggaaaacgcaccgaacaattgcagattcacctgtctcatcacggctcctggctcgccagctgcacagggtcctgatgaccccagccctgcacgcgcactggcgtgccggcaggggcgagaccgccctcgccgtccagcaccacccaggcgttggcctgcagcgtggacatcaaacggaacgactcctgcccagccagcacgcgcgcactcaggcggccctgcgcgtccacttccacccgggcccgcgcatggaagcgcaggcccggcggcgtgcgcacgtcggcctgcagcggcaacatcagcacctgctccggtgccagccccagcaggcggcgcagcaccggctcgacaaagaagcgctggcccaccgcagccgacaccgggttgcccggcaggccgaaatacagcgtgccattgggcagcaccgcgaacagcaacggcttgccggggcggatcgccaccttgtggaacacgatgcgcgcaccccggccgcgcagcgcgtcgggaatgaaatcgtagcggccggccgacaccgcgccggtgctgatcaacagctgcgcacccgcgtccagcgcttgatccagtacggcattgaaggcggccacctcatcgcccaccgtgccctgccagaccacctcggcaccggcggcctgcaggcggccgaccaggtatggccggttgctgtcacggatctgcccggattccagcgcctgcgccgcctcggtcaccagctccttgccggtggcgatcaccgctgcctttggccgcgccaccaccgccacctcgcccacgccgatcgcatgcagcaaggtgcgcgcgttgatgtccagcacctgcccggcctgcagcacgcgctcgccgtcgctcacatcctcgccacgcaggcgcacgttctggcccggcttcaccgcgcccttcagggcaatgcgggtcgggcgtccatcttcgctggcgaggatctccacattctcgaccggcaccaccgtatccagcccaaccggcatgcgcgcgccggtcatgatttcccaggcgccctcgccgccttcggcgccggcatcgccggctgcctgccagccctgcacggcaaattcggtaccagcctcgaacgtcgcgccgttggcgcgcagcgcgaagccgtccatcgccgaattgtcgaacggcggcagcgactgtgcgctgtggatgtcacgggccagcgtgcggcccgcggcctcgtgcagcggcaggcgttcggccggcagctgcttggccgcgtccagcaggtgctgcaaggcatcgctgtaggggatcatgcgtggccatccccctcgaccatcgccagggcgtggcacagtaccggcgccaggatgtccaggcactgcgccgccgccttcgggctgcccggcaatgcaaacaccagcatgttgcccagctgcaccacctcggcgcggctcagccaggccatcggcgtgtgctgtgcgctcagtgcccgcaccatctgcgccaggccatgcaccggccgcgcattcaacgaacgcagcgcctccggggtcaggtcacgcgggcccagcccggtaccaccggtacacaggcacaggcgcacgccctcggcagccaacgcctgcaggcggcccgccaatggctcgatgccatcgggcagcacttcggcggccaccacctcgccccccagcttcttcagcccggtcaccagggtcggtccagagatatcctcataggtgccttcgctggcgcgatcgctcagcgtgatcaccgcgcaggccgcgccttccaggcccttcggcgcacgcggcttgaaccgctcacgctcggcctcgtccatgccgtccgggtgcagccagacaccgcgcttgccgccctccttgaacagcaggcggatgccttcgatgcgcaacgccggctccaccggcttgctcaggtcgtacagggtcagcagcgccgcgttgacgccggccagtgcctccatctccacgccggtgcgcgcctcgctggcgcactcgcaccacacgcggatcgcctgccgttccggtaccggcgcgcagaacacctgcaccagttccagcggcagcgggtggcacagcggcatcagcatcgaggccatcttggcgccctgcaggccggcaatctcggccatcaccagcgcatcgcccttgggcaggcggcgctcgacaatcagcggataggccactggaccggcatgcagctcgcccaccgccaccgcacggcggcggctgatgcgcttgttgcgcacatcggccatgtggaaggccgcgttcaattccccactcatcgtgttgctcatcctccgatggaggccaggtgcggggtcagcccggtctggccctggtgcagtccatgcccggccgctttcaggccaagctgggtggtgatgcgtgccagcagcgcgtcgtggtcctcatcgcgctgcagcagcggacgcagcggcacgccgaactcgccgaacaggcacagccgcaggtcgcccttggcggtcacccgcaggcggttgcagcccttgcagaagtcacgcgaatacggggcgatgatgccgatgctgccgcgatggtcggggtggccgaactcgcgcgccgggccggcgtcggccgcgcgcggacgctcgtgccagcccgcggccagcagctgctcgaccaccacgtcggcgcgcaggtggtggcgctggaaataggcttcgttgtcgccggtgcgcatcagctcgatgaagcgcacgctgaaggggcggtcacgcaggtagtccatccactgcggcagctcgtcgtcgttcaggccccgcagcagtaccgcgttgagcttgatcgccggcaggcccaacgcctgcgccagcgccaggccctgctggatctccggcaggcggtcgtgcccggtgatggtgtggaaacgctcgcgttgcaggctgtccatgctcacgttcagcgcggtcaggccggcccggtgccagccccgcaggcgccgcggcagcagcgtgccattggtggtgatggccaccttgcggatgcccggcaccgccgccacggtggcgatgatctcgtccagatccttgcgcaggctgggctcgccgccggtcaggcggatcttgctcatgcccaacgccgcgaaggcccgcaccaggcggccgatctcatccacctgcaggaaacgcgggtggccatcggcctggtacccgtcgggcaggcagtagctgcaccggaagttgcaggcttcggtgagcgacaagcgcaggtacggaaagctgcgtccgaagctgtcggtgagttggctcatggctgttctgcctcctggtaccaccctgcagccctgcccctgaacgggttgtcgaccccagcccgcagagtgcgctggggcgttgaaagcgtcaacccgggaggcacgcagcctgaattggcgccgcctgtcgtgataggccctccccgcccgtcccgttcgccgtgacaacctcgacacatgtcgcagattgcacgttgcgggcggatcactacgccagccagcactggcggggcttaacagcgtaggacaatgtcaaaagcgtctccaatcgagtgatgtttacaactcttctgattggcattgcacagcgccaggggctcagatggcgtgccaccggaaaagggtggccgggcttcgaacacccgagttgatgttgatgtatgcgcttgccagccggcgccaccctagcgtggcgccggctggcaatccgtctgccggctatggcgggcggtgcgtgggggccttcgggcccaccggactgacatcaacccggtgttcgaaccacgtaccgtccgccacttttatgggtggcggctaccgattgccctgcacggagccttgccatgaacgaatcggacttcccgcatctgcacgcctaccgcagcaccgccggcgacgacggtgcgccacaggctgcgccaacagtggacaggaacaccttcattgccaacctccaccgcatcggctccggtgctgcggccgacggacaaccctggccggagcgtcaccagctgcccgggcgctgcctggccctggccgacgccgattgcgcgttgagcgggtcgcgggtggtgctggaaatgctgctggcggccgaacgcacccgtcagaacggcgaacccgggcagtacgtgggcgaccgggtgatggaggggttggtcatggcctgccagtcgttgtgcgcccaggcggtggggcggttgcagcccgaagggtgaatgccatgtgcaacggacttcagcgaggatcgcctcccgcccgacacgccgtcggcgcagcccccttgttcgggggaaccgcgtgtacattccagcgatctgccaaagcgcgttcgacgcggaaagagaatgaccatgcctcggcgggcatcttcccttcagagaaaccaatagctatctcgaagcgatccaatccgaggttccccgcctccagtcccgagccatcttcgcgcttcactccgatgtagacgacagggcgttgcacgtccacctttgccctggcaagctggcgatccaattcagcgctgccatcgaagaactgcattccttcgtccttggcaatagagctgagggtctgcttgaaccgcttcaagccgtcttggtcatgcacgcagaactggagcatcttgaagggccgctttcctagagcccatgcgccgccagagaatccaagtccgactccaatcagaagtagtgctgtcaggatcctcaccatcatcaaggtcccaatttgcagagtgtggcggccaacgtcgccgcagggccaaaaatcatgaccccaaggatatctccgctcggtcttctcaggcgccttccgccggatgagggagaccttgtcgggggtgaggaatctgggcacggaatgtctttcagggcactgcacccgccatcggcagatgctcgatccgccatgtcctggcgtagatcagaatgacgctaccggtcgaggtggtctcgatacgaaaacacttcaggccggacagcggatagccgaccgccttccaacgatcaagaagatcagcgagtcccggcgcgtcatcgtcaactctggcgaactcaattccctcgtcacccagtacgccgaagttcatgagcgcagagcacccgtaggcttccgagaagcagacggttgcctgccggccgtccggccagcgcacttggacctttacctcgtcgcatacgccaggtttgctcctgtcaatattgatggccagcaacgtggcgtcacaccattcgagcaagttgaaatcttcattcatccactggaatccgtcagatgcatacgacggaggtgcgaccccggtcgccccttcctctctctcaccgctcctggagctccccaagatcgagatcccgggcataggagcgccgactactgatcagcaccggcttggatgcgaacctccggccgtccctgcattcaacggcgaattggtagctctggggttccggccctgcaacgaccatcatggggaccgcgaatgtgcttccaaccggtttcgacgaaactacaccttcgccctccccgagcatgctcagctcacaatctagagcgcgaacgtcaccctgacctggcggcacgcttcccgagacgcgcacgatcatatcgccacccgatgttgcacagccggccagaaccagaccggcaacgacagcggcggcatacctcaccttcggcatccccgaattctcagtacgcactgcgacgtctacgccgattagccattcagggatgcatcaatctcatcaatagatacccgccatgatacgaatgtagtcgtcgagcgaatccacccgccgatcgactgcaataccacgcttttttgcgagcgattgaagctcgaatatcaacaccccataccccgagtcccagccatgagcttcaccaggcgacagttccttcgaaaatcgatctccaggacggagcctcccggagggcaaacgaagctcgtctgcaacatgctccagcagctccactacggtttcctgatccagaccactctccgcatagtattggtcatagaagccagttggcgacagcacgcctctttctctcaggcattctttcatgtccattcgcctccatccaccacctgcgctgcagccacaatagaccatggagccgatatcccataggtcctcccgcacagtcgtcaccgcggcccagcaatcttcctgccgaacgcctgggtgcttgaagcttgccggaccatccgatcttcttacacggccctcccattcgtgaacacggacaagtggcaaggtcgatttgacacatacccgaacccacacgacgctcggccggaaagtgccgaatcaggcaccgggaaaggagatcgccacgtgccactcacgcatttcgcttactaggtgagaccgcccagccacctataactttattccgctgtaaacaaggcccagctcttcatcgcgcatgacccagcggccagcatttccctccggacacagatagaacttgccgccatagcttgatgctcgtgaccacgcgctgcgagcagactgtggaaatctccgcatgactcgcgcgccggacagctccggcctgctcaccagcctacattcttcgggcaaagtaagaaccccgctggtcaggcggaaaaccagccaagattcatttgtgtcaatgtcgtgcgactcgcgtatattgactgcatcctctggcaaccatgaaggcaaccatttggattcaccgattgcttgccttgagacgacttgattgcggtctgcatactcggtgctggcaacttccatgcaaccagaaagtgcgattgacagcgtcacgatttggagcagcttggaagcgtacatctgaggcatccgagtcatcagcaagggaagtttccaccgggtcgatagctcccgcacatctgcgagcaactccgcgtacggctcatttgtccagatgatcgtccgaggcggtttgccagctgatccgcagcgaagtcagcggcggagtcgcccttgatgttttgatcgaaccactatagttgtaaaacaacccgctcgcatccgtggcctgctggcccgggaagcgcagcgccagctcaaacgccacaccatcgccatccgggtcggcactcggaatctggttgccgaacacctcgctcttgttgctccactcccagatcgagacgttccgtaccgggtcgatcaccacgcgcggcgtacctaggtgatccggctggacgtaggccagttccggcacgccggtactcggcacattgatcagcgccaccgggtagttgtccagccagatggcctgctgttgcgcctggcccgtgatggttggttgccggatgggtgtggctctcgcttcctgccaagatggtcagtgtggtgcgattgccagtatcggtaggcagaggtcccaatcggcctgctggagaactttaattagcggacgtaacattagctcacagtccccagaagccatcccagatcaagcgccaccaagatttggctattcgggccgcttcacttggctttcttgtgagagccataatgacccatacggtgcttccgcccatgatgactagcgcaaccaacgtcattagcgcggggcttatgtgcctataaaaccaccagcctaggaggaccaggatcatcaaagcaacatagcggagcagcaatccagttttcatagtcctatggttcctacttcctgcaagaattcccttggcttatggacagcctccttaacgtgcttctccataatatcaatccaaaaaggctcaccggggtcatctgactcagttccccaaggcaacaaacccgagtatgtcttcaggacgtcgcccctcgaatagttgctactgtcttcacaggctgcctccgcccactgctgctcggcgcgagcccacgccttctggccactagtgatgttccagacgcccagcccaatacttgcggagcccggtgcggcagtcactactgccccctccatgccaagtcctccagcgatcctcagcgtacccgaagcaagcaagcgcccagcgttgatcgcattcccaattgcgacggctgtcttgtgcacgttccttaatcccaacgggtctattaagctaagtgaatttccgccaacgtatccgtaggtgctgattccgcctcgtaacccaatcggatcactctgcgaataccgacccactgccgggtcgtactcgcgctggaagttgtagaacaacccactcacatccgtcgcctcctggcccggaaaacgcaacgccagctcgaacaccacaccatcgccatccgggtcagcactcggaatctggttgccgaatacctcgctcttgttgctccactcccagatcgagacattccgcaccggatcgatcaccacgcgcggtgtgcccagatgatccggttgcacgtaggccagttccggcacgccggtactcggcacgttgatcagcgccaccggatagttctccagccagatggcctgctgctgcgcttggcccgtggccgagtagttgcccagccattgccctgcttcgtcgtacagcgtgatctgggcagctccaccggtcggggtgcgcagtacgcgctctccacgatggttgtaggcgtagctttccagcaccgcattgccctgcttcaccgcgttcatgcggttggcgtcgttgtaggtgaacgccttgctgccgatgctggtggtattgcccgctgcgtcatgggtgcgcgcctcgccatccaccgcggtcagccggtggctggttgcgggataggtgtagctggcagtgcctgccgaggtggtcagcgcggtgcgattgccggtggcgtcatacgcataggtttcaatcggcgtgccggtcgcgccgtcctgggtctgggtcaggcgacccagcgcgtcgtaggcgtacttggccagcaccgacgagcctgcgccgttcttcagctcggtaattgaaccgaccgggtcatagccgtagcccagtgacaggccgcccgcggccgggtcatgcaccgcttgcgggcgatagtccaagtccagcggacgctgcagctggcggccattgccataggtccagcccgtcgccgggccgaaggccgcgtaggtcacgttgttcaccacgatctggcgcgcttggccggggcgggtgaggccgatctgagtgatgcggccctgggtatcgcgcacgtagtcggccacgctgccgtcggggtaggtcagcgcggtcaagcgacccgacttgctgtaggcatagcgcagggtggtggccacaccattgacggtctgcaccttgcgggtgacctggccgaaacggtcatggcagtactgggtgctgccattggcgtgcagcacctgccccaggcgccccttggcaaaacgctcgtcggcggtacacgcagcaggcgccacgtcatagctgtagcccacgtccagattggggtccgggtaggcgataccgatcaggcggttgagtgcatcgtagtgataggtggcggtgacgccacgcgcatcggtagccgtcttgcgattgccggcggcgtccacggtgaagctgctggcgccactgtccgggctgacttgcccggtcatatcaccgaaaccgttgtaggcataggtggtatgcaggcccttcgggtcggtgacctgggtgacctggtccagcgcgttgtactggctgcggatctccgccgcgacgccgccgacgtcctgcagcgtctgcgccaggcggttcagcgggtcatactgctggctggtcacgcgctgcagtgcgtcggtgatcgtctgcgggtttccgttggcatcgtaggcgaagcctgtggcgtgattgcctgcgtccttcagcgcggtcagctggccgagcgtgttgaacgtccgtgccagggtacggcgcagggtgccgccggtatccagcgtgtcctccttgaggcggttgccggcgttgtccagcgtgtagtgaatcgtgttgcctacgttgtcctcgatatcagtcaagcgcagcgccgcgtcgtagacataggaaacgctgctgccgtcgggctcggtgatctgttgcacctggccggtcggccagtagctgatctgggtgacccgatcctcgtcagtggtcgcgccgcgcacggtgattgaggtcggccagccgcgggcatggtaggtgtagtcggtgaccacgccgttggcatccttgaccgacaacggccgctcgaacgcgtcgtaggccagagtctcggccgtctggcccagcgcattggtcacactgcgcaggtcgcccttgcgataggtgcaggcgcctccgatcgcgcaccctgcatcatccgccgagtaataggcataggtaacggcatcggccacatccgtgcgcgggccatccacactcttcagcagcccctccaccgggcagctgcctgccgctgccacatcagcggcttcgcagtacgtgtagctggtgatgcgcgtctgaccggaagcggtgtcggtcaccgtgttggccgtcggctggcgtcgggaattgaaggccgtgcgggtttcgcggctaccgatccgggtggtcagtaccgcgttgatttcgacgtcgcgcgccgtggtcaccacccgctgctcgggcaggccgaccgcttcggtcacggtatggatgctgacggcacgaccactcaccggatcggtgccctgcgcataggtgtgcttggtctggatgccgcggcgatcggtgtaggtatccagacgccggcggaagtcgacactctggtcgtagtaggttcggctgacggttccctgcgaatccgtcaggccggtcaccttgcgcgacggagcgctatcgccgccgggtgtcagggtgtagtcggtctgccgccccagcgcgtcggtcaccaccgcaccaccattggggctgtaggccagtgtcacgccatcggcaccgccggcatgctgactggaaatcacacggccgatggaatcgtaggtgaaggtgctgtagcggcgaccgtcctcggcggtgatacccgtcaggtgctggggaaaagcctggttctcgtagtgatacgtgcgcacaccgccacccgcataggtcaccgtggcgacctggttctgcggtgtgtaggtgtaggtggcgagcgaaatgccttcgaccagcaccgaactgatcagcgcctcatagtcgttggactggtagacgaactccagtgtgcggccactgctgtgggtaacggccgcaaggcggtcgctgtcgtcgtagatataggtcagcgacgtgccatccgcgaagcgcttggcggccagacgcccgtccgcgtcgaaggtcgagatggagcccttcgagtacagtgtccagttgccgttctggaccagacgatcgccactgtcgtcgtccgcctcataggcttggccgaccttcttgaatgcacgctggaaaccagtactttcaatgatgcccacactgtcaacgccatccagtgccaagtgggcgcctagcgaatgggtccagccataaccgaagccaccggatgaggtcgagatgccggagtgatagaagcgcgtcagcgcgatccagcccagatcgaagtccggcgcgatttcgtatttctcgcccgttttgacgtcgcacggattgcctactgtgccgtcgcaaggcgcgttgtttgcctcctcacctttttctgtcgagggacaactcggacccgcgctgtccttgtcgcacttctgcgacttcgaggtaatggttgcaacgaattcttcgctgacgcaggcgttgtgtgtgttggaccactgcgtgaaggggatcgggcagttcaagcgtcgcatgcgagcaagccctgtcgttcctgcgtcgaagggcacgcacggagactccgccgaattgctgcccagcatgccggtgacccggtactccctgacctccgaaattccgtccatccctggagcagttgggccccattctccttccggcacagcagtttccccaggacactggggattgatgtcctgcaagtctgcaatgagcgcttccagcacttcctcttcggacaggaagccaccatcacccgcgccgtagtaagtccagtcagggtcggagggctgcgtccttcccatccagtaggtgatcgacgtgtttccgttcaagtccacgactttcgacttgatcttgtcgacgtactgccagccgaactggaactccggcgggaaggggctgggcgccggcaggttcttgatgccggccaccgccgcctgctgggtcttgtactgggtcgcatcgccgccgggctgtgaaatgcgccaggtgatcttgctttcctgcgcatgcgccacagcaggggcgaagcagccgagggcgacaatcgccagcacggcacacgaaatggtcttcagtcgttccaacatccctgttctccttcctggacgaacacagcgccggcgggaacgagaacgcggagctgtgcccacgcgtcatgcatcggatcgtccctggtccggaatgcggcagtgccacatgccgcctttatcgtcgaggacgcttgcacactcaagtgtggagtcgcgtaaccgatcacagattcaggcatccaacgccattcagcggactacgctccgtccccatgacttcctgcacagggagtcggtgttatacctcactacattaccagcacgacctgtcgcgaggccggcaggctgcggcactccgctgcagacctgacccatcggaagggccggcacgcgtcacggcccaggggaatggcaatgaagagcagccgagtgacgttgtgggtgctggccgcgatgatggccactgcaggcaccgcccacgcaggggaaatccaggtggatcgcggcgcctacgcgctgcaggccgaagagaccggggccggcccgatcaccgtggtctttgaatccggcttcgggcagggcgcgggggcctggaaggaggtggttgccggtctggggcgcgactaccacagcatcacctacgcccgtgcgggactcggcaagtccggcagcgacggtcaccccaagcgcatcgatgcgcatctggccgacctcacggccgtgatcgatacgctcgcccccggtcgccgcgtggtgctggtgggtcattcctatggcggcctgctggccacggagtttgcacgccgccaaccggagcgcctgcagggcctggtgctggtggacccggccacgatgggtcagcgccatgcgttcaagcaggccgacagtgcccgcgtgcaggcagatgatgcccagctgcgggcgatgctgccgccggccatggccgccgactacgccgtcctgaccgaacagctggatgcacccggtgcggaaaccccgcgcacgatgccggacgtgccggtagcgctgctgactgcaacccagctggctgccgaaccgctgttcttcgaggaaaccgcagagggcaaggcactctggaaagcacagcacgccctgctcttttcgggattcacgcgcggctcgtaccgctacctggcaaccggccacaccctccagcgcgaggagcctgctgcggtggtggccacgattcaatcggtctccggcacctcgaagtagctgttccaggcaggggcttcccgggttgttccccgctactgcccgcgcagccgaaccgcgaagtaccgcgccggggaaaggccaagcgccttcttgaacatcgtgatgaaagccgtcaccgactcataacccagcgtctcggaaacgcgttgtaccggtgcgcccgcggcaagttcccgaatggcgatgagcaggtgcagctgctgccgccagcgaccgaaggacaagcccgtttcgcgttcgatgaggcgggtcaacgtgcgctcgccgagggccaggcgcacggcccactggccgatggtgctgcggtctgccggatccgccgacagcgctgcagccaacgcccgcaccttcgggtgatggctgaccggcagcgacagatgctcggccggcatctgcaccagttcgtccagcaacacccgcgccagccggtcggtgtggctgccatgcgggtagtccagcggcgcgtcggccaggtgcaggatcatctcgcgcagcatcggcgagatcgccagcgtcacgcactgcgccggcaggtcgacgatgccgggctcgacgaacaggtagcacaggcgcgcgttggcggtggcgcggttgctgtgcggcatgccgcccggaatccatacgccacactggggcggcacgatccacaacgcattggccacttcgcaggtcaccgccccatgcagcgcaagaatgagctggcccttgcggtgctcatgcaccggaatttccgcgtcgtgctcggccacctgcaggcggctggcaaccgccgggcgatcggtctcgtcagggtccaggtcaaagccggggagcgaaatgcgagccattctcacattgaccggttttagcgattgattgtcattgtagcgaaattcgccagtgcggccgatcactagcatgagccgcatgcacgcccccacccctgcccgtctccacgtgttccaggcattcgcctggttgaaaagccctgccctcaggaccgaccaggaggcggtgctgttctcgctcaaatgcctgctcgccgcgtcgctggggctgtatgtctccctgaggatcggcctgaatcgcccgttctgggtgatcgggacggtctatctggtgtcgcaaccgctgtccggggcgacactcagccgcggcctgttccgcctgctcggtaccgtgggcggagccgtcgccaccgtcgtgctggtgccacgtttcgccaatgcacccctggtgctgagcgccgcgcttgccacctggatggcgctgtgcctgtacctggcgatgctcgaccgcacgccgcgtgcctatgcgttcctgctggccggctataccaccagcctgatcgggtttcctgcggtgatggtgccggcagacgtgttcaccatcgccatcacgcgggtgcaggaaatcgccatcggcatcctcgccgcaacgctggtacacgcgctggtgctgccgcgccgggtctcgatacgcgtgcacgcgcgggttgctgccgtactggatgacgcggaacgatggacacgggacatgcgcgccggtgcatcggacacggtgctggcgacggaccgctcgaaagtggccgccgacctgctcgagctgcatgtgctgtcgatccacctgcccttcgacagcgcccacggcgtggcccaggtgcagatcctgcgtgccctgcatgaccggatgctggacgtactgatgctgtccagcgcggtggaagattccctcgcacggctgcgctcatcacaggccagcgcgatggattcgcctggctggcgcgagctgatgcagaccggcctcgccgcgcaacaggccgagctcgacctcgcccacgccgactgccgcgtgctgcaggcacaactatgcactgcccggcccgactggcgccggcatgtacctgcccgccttgcgcgacatgcgcagggtgcggtacttcaccgggatcatcggcttgccctgcgcagcgcgctgggcgcgttcgtcggcatcctgctgagctgcgtgttgtggatcgttaccggctggtcggacggcgccacggcggtgtccatcatcggcacggcgtgcgtgctgttcggcacgatcgaagcgcctgcgccgcatgtcatgcgctatctggtgggatcgttgatcggcgttggcgtcggcctgctctacggtctgctgatcttccccgcgctgtccgatgtcgtcggcctgactgccgcgctggcgcctgcgctgctgctgtgcggatcgttcctggcccggcctcccttcatcatggctgccctgggcgtggtgctgacgtttccgctcatcgcgggactgggcgcgaccaatacggtcaacatcgtcggcgcactcaacaacagcgtagcgttgttcgtgggtacgacagtggcactgtgcagcatgcagctgttccagaccgccgatgcgggccgcaaccgcgcacggctggagcgttcgatccgtcgggatatcgcacgacacgccgccggacaaggtggcgtggcccgggcctggctcagccgcatgctggatcgaatcgggctgctcgctccccggttgcggggcggttccagtgccgcagacgacctgcgggcattgtttgcggacgtgcgtgcggtacgtgcatccaaccaactccgcgcactggacaagtgccaggaaaacccgcaggtccgggtgcttcatgcggcgctgatcgaacgcgtcgccgcacatttcagggttcgtgcccacgcgccacgcagcgtcgacgcccatcttctggaactgctcgaccgcatgcgcgaggcagcagtggccagcagcggggatgatcgtgagcatctgtcgcacctgctctgcggattgcgccgcgacctgctggcgcctgctctcacccttcggcactgacctcatgttttctgatctctccattgatggcgtgctgatccccggcctgctcgccgtggccgccgccgcgctggcgctgtcgatgctgacctcgcgcctgctcgccagtctcggtctgtaccgcttgttcgccgcgcgaccactggtgggcctgtccctgttcgtgatcctggcggagctgatgatccggctctcgcccctgctcgagaaatgaaatgaaacacctgcttgctgtcatcgggcgctggagcgctacgctggttgtattcgcgattgctgtcgtcgccgcgctgtccatctggaagcgttacgaaacacgcccgtggacgcgggatggacgggtccgcgccgatgtggtgcgcgttgcgtcggacatgggggggctggtcacccaggtgctggtgcacgacaaccagcgggtcagcgccggacaactgctgctggtgctggatcagccacgcctggctgccgcgcttgagaaggccgacgcagcggtcagcagcgcacgcgcgacgctggcgctggcccgccgcgaatcgacgcgggacaacgcactgggcaacctggtcgcctcggagacacgcgaacgcaatgcggccaaggtcgacaccgagctggccgccttggcgcaggcacgggccgaacagcgcgttgcccagctcaacgtgcaacgcaccgaggtgcgcgcgagcaccgacggcatcgtcaccaaccttgacctgcatgcgggcgattacctgcaaccgggcgcgcaggcgctggcgctgatcgacaccggcagcctgcgtatcgagggctacttcgaggaaaccaagctgggctgcatcaccgagggcgatgccgccgtggcgcggctgatgggcgacacccgcgatgtccgcggacacgtggagaccatcgccgccggcattgccgacgatcagcgctccagcacgcacaacctgctgcctgccgtagcgccgacctatacctgggtgaggctggcacagcgcatcccggtacgcatccgtatcgatgatgcgccgccggatacgcgcctgatcgtgggtcgcactgcgagtgtgaccatcacgccctcggcaccgggagcctgcaagtgagcgtgcggacagtacgtggtgggctgcttgccctgttgctgcccctgacggcctgcgtatccggccccgactatcacctgcctgcgaacgccgtcgcagcttcacaacgggctgcgcgggcgttcgtctcaggccaggacgcatcgttcagccacgacgcgccaccggatcgatggtggcacctgtatggcgaccctcagcttgacgcctacgtacgcgaagcactggcggccaataccgacctgcgcgccgccgatgccaaccttcggcgcgccagcgctaccgtgctggagtatcgcgcgcgcggtgccgtacaggccgacgtggatgcatcgggcacgctcacccatgccggtggctacacccaggcgtcggccgccccgcagtcgtacgcgctgggccttcacctctcctatccactggatcttgcaggtggcatccgccgcggcatcgaagccgccaacgccgacgcggaggcggttgctgcggcacgcgaccaggtccgcgtggtcgtcgctgcggccgtcacccgtgcctatctccaggtgtgcacccgaaatcacacgctcgctgcaacccggcaggtgctggcggtgcagcgcgccaccctggacgcaacccgacgcctggctgcaggcgggcgcggaacggacttcgatgtcagccgtgccggtgccgccatcaatcgcagcgcggcggcggtaccgcacctgctggcggaacgccaggccgcactgttcgaactggccgcattgatgggcaggctcccggcggactatcccagggaggccgaagcctgcccacgccccccggagctggagcaggcgctgccggtcggtgatggttggcagctgctccaacgacgccctgacatacgtgccgccgagcgcagccttgccgcagccacggcgatgatcggcgtagagacggcgggtctctatccgcagatcaccttgggcgcctcttcgggcgtggccggcacaccggcgcatctgctgtcggccgacggcttcggtgcgagcatcggtcccgtgctgtcatggcactggcccaaccgccgcgtagccaaggcccgcatcgcggcggccggcgccaatgcagataccgcgctcgcgtcctttgacggcgtcgtgctgcaggcactgcggcagaccgagaccgcgctttctgcctgcacgcaggagcttgaacgcgagcgcagcctggcgcaggcgcgtggggatgcagcgcgggccgccgggcaggcgcagcagctctaccgtttcggcaggatcgattttctcgacctgctttcggcccaggccgcgctggcagatgcggagtccgcattggctgcatcgcgcgcggaccgggtcgaccgccagctggatcttttcctgtcgttgggcggaggctgggccgcaacggattcggccgcgcgcggtgcccggtgacccgttcagggcagcgactgcacgccgcgccgtctgttcaggaacgtaccgcctacacccgtattcattcactctgactgccctatattcctgccacagcgccgcatgctgcggccatgacggaggcatatccatgaagacaacacgtttgctggccatcgccttgaccaccgccaccgctttcgctgcggcccccgcgttcgccgatccgccgcaccacgcccgtggcaacggcccgccgccgcacgcaggcggcccgcacaaccgcgaagcgccgccgccgggctggcagaagaaggcctggcgacgtggcgagcgcctgccgtgggccgaagtggaccgccgctactgggtagacgattacgcgcgttatgacctgcgcgaaccgggccgcgaccggcgttgggtgcgccagtccgataacgagtacctgctggtggagatcgccaccgggctgatcatcgacgccctgcatcgctgaagcgacctgcagcgtccgcacacgcagcgatttacatcggtgcagacaccttacgaccggggccgccccggtcggcggtgtctgcgcccacggcgccccgcccgcctccgcggcccgccatgcaggccctcccgcagcgcgatatacccgcacatcagcgctgtggcaaatagccccatcgccaccagtatttcgaatccccgatcaccaaagagcaggcggatggaggtctccagtgagcacagcctgccgcagcgcaggccgtgctcgttgaagccatggatgagcaccagtacgcccatcaacccgcaccacgccatcagggccaggcttgcgatgaagatgaaaggtcgatggatacccatgcgctcgtcgcggtcttctacggtgatgcccagcgcgacgttgcgagcacgcgatcggaagcatccagctctaccgaccaggcttcggtatccagtcccagccggttctcataccaccatcgctgcgcacagcgaccactgcatccacggctggcatagcgggtaaagggaacatcggcgtgctccaccacgtcagggggccccagcgcccgcagtacctcgcccctgctcgccccgaccgggaccgaggcaagcgcgtgggaatgccacgccgagatcgccgagcaaccggccacgtacgccacgaacaggcccgcaagcccccacattagtgccctcattgacagatcccctcctgcgccgcgcgcccgcgcatcatccgcgcagaccttcttcaacgtcaaacctcgacacgcgggcctgttgcagcgcccggcatccgtgctagcgtgcgccgtcaaactctccatggggtgcaggatgcgcaatggaatgggacggaatctggtgatcgcctgcatggccctggctgttgccccagcggcggcaacagcggccgcaacagcgaccgcaatgccgggcgatcgtgggcaggatttcgtgcagacacaggcgatcgccgcgcgctgccagaagagcctgcccggcctggaactgcagttgcaggagggccgcaagcactggctgtcgacactcgacgccgcgcaactgcaggccgccgaggcctatgccagcagcaaggaaggcaggactctgggaaagagtgtggagcgggatgcctcccgcgccttcggtcgcaataccttgtccgccgcagcgacctgcgttggcctgctcgccgagtacggcccggcccacccgctgccttccggcacggcaatgccggccgaccgggtgcagcactacatgctgcactttgcaccgatggtgctggctcggctgcagtgcgcgcgcctggacggcatcgacgtggccgcccagcccgatggctcggaaacctggcagtaccgggcctgtggccagaccgaatccgtgcgcatggccccgctcgggcagagctggtcgatgagcgatgcggaccgcaatcgcctgttcgacgcactgacccgataggtcggacggtattccccggggtagcaggaaccatgtttccacccaccacctggatcaagttgcgatctgcctttacattggcggcctgcacggtgctatgcgcctgggtgctatgcgcctgcggcctggttatggacagttcgttcgacactctgcgcgaggcgcttgactccgacatggtgaacaagggatggattcccggctgggtgccccacgaggcgaccgacctgcgcgaggtgcacgacctcgactcgaacaccagcgcgctggccttcaccaagcctcctgcgataccactgcggctgcctgcggattgccaggcaacgacattcagtcacagcgatcctgttgcgttcgatcgatactggtggccgggcgacgggacgctcaagtcgtcgtatcgcgtctttcgctgcgcgcccgaatccggaaaatcagtctttgtcgccatcaacaggaccgaagaccacgtgctcttctggcgaacctacgcgcggtgatgcgcccgcgccaccctattcctccccaggaccccatgatgcccaacgcacgtgcacgcttcgtcgccctcgccctgttgctcccggcgtggctgccggcctacgccacgcagaatgcccccgccgacgtcaaggcgatcgaacaggtggtcgaagcgttccgcacctcgctgatcaacaaggacaagccgacctacatgggcctgttcttctctgataaaccggaagacatcggctggcagttcgtttccgaggatgtgcgcctgcaggacatccgcaaggccaagcccgatgcgatcaaggcacggcagattcccgccaacaacttcatcgcgctgatcgacggggcggtcgcctcgccgaagccgaaggaggagaagttctccaacacgaagatcgaaacggacggcgatgtggcctcggtctcgtttgactacagcttccacgacgatggggtgaagaccaactggggcaaggaaatgtggcagctggtccgcaccgagcagggctggaagatcttctcggtgatctactcgatccgcgattcacgcagcccgggcgattgaacgtcgcttgaccgggccgaacccaggccgcgatccattcagcaagggcattggcattcggccatcgatcgggcagagttcggccacgcgcaaggacgcatgccatgacccgcctgctgatcatcgaagacaaccccgagctggttgccaacctgtatgccttctttgaaccgctcggctacgtgctggacgacgcgcgcgacggcgccagtggcctgcgccgggccacgcagcacgactacgacgccatcctgctggacctgatgctgccgcgcctggacggcatgacgctgtgccagaagctgcgccaggagttccagaacccggtgccgatcctgatgctgaccgcacgcgatccggtcgaagaccgtgtgcagggcctggccctgggcgcggatgactacctggtcaaaccgttctcgctggtggaactggatgcacggatcaaggccctcgtacgaagggcacaggggcgccaggtccagagcgtgctggcgtggaaggacctgcaggtggacacgcgctcgccacaggcctggcggcaaggccgctgcattgcgctgacgcccacgtcgcacaagctgctgatgtgcctggtgcgtgcagctcccgccgtggtgcgcaagcaggagatggaatacctggtctggggcgacgagccaccggacagcggcgcgctgcgaacccacatccatgagctgcgcctgcaggtggaccgcagcttcgacaccgcgctgatcaccacggtgcacagcgtcggctggcgcatgcaggcgtgagccctgcctccctctaccgccgcctgagcctgcgcacccgcatcacgatctcgttcgtgctgttgatggccggtgccatgggcttcatcgtactggccgaacaggtcgactacgaccaggtccgggctgctgtcgtcgcacggacccagcacggcgaagtgcaaaggctgcaggccgcgctggatcgtggccaacgccccgccctgccaccagggacccagctgttcgatgcccaggacgtgccattcgtactgcgccaatacggcccgggctaccacggcgaagaggcgcccaacgagtggcacctgcgtgtgttcgacagtggtggccaacgctactacctgctgcaggacgccgcaccctatggctatctggaacacctgatcaatgcctttgcggcactggtcatttcggtctgcgtgctcggcgccttcctcatcggccgcaaggtcgctacccacgtcatcgcgcccatcacacgattggccgatgcggtgcaggacggccacaagcccttaccctaccaggacgcacgcgacgagatcggcgtgctcgcgcgcgcctttgcccgccatagtgacgagctcgaacggttcctgcatcgcgagcagtgcttcagcggcgatgccagccacgagctgcgcacgcccttggccatcatcggcggtgctgccgaaacgctggcctgccagcttccggccgacagccacctggttcccagcgcggcacgcatcctgcgtaccacccaggagatgcagcgccagctgacctgcctgctgctgctctcgcgtgcccccggcgccgtgccgcgcaacgcggtggccctgcgtccgctgctcgaatcctccatggagcgctgccagccctggctttccggcaagccggtgaccgttgcgtttgatgcccggcatgacgccgtgctggtcaccaacgcggatctggcgcacagcatcatctggaatctgctgcgcaatgcctgccagtacaccgaaagcggcgaggtgcgaatcaccctccacgacaccgcactcatcgtcgctgacaccggacccggcctgccgtccagcatcgacccacggcagttccagcgcttcgtgcccggtggcgcgcacagcggcgaggggctggggttgtcgatcgtgcagcgcatcgtcgagcacctgggctggacgatgaccgtgcaatcctccgggcaggggtgccggttcaccctgcgctggccccgcccccgcatctgacggattcctgacatcgggctgcacatgctccgggctgctcccccgctctggagacggcatgcagcaccccaaggacagcggcaagtacccgcacggcaagaccggattgagccgcatcttccacacccttatccattcgcgcgatggcttcatcgccacctttcgcggcgaggcggcgttccgccagttgttgctgctgcacgcgctgctgatggcggctgcgttcgtgctggacatcagcacggtcgagcgggcactggtgctggcggtctgcttcatcagcctgctggtggaactgctcaactcggcgattgaagccgtggttgatcgcatctcgctggagaagcatccgctgtccaagaacgccaaggacatgggcagcgccgcgcagaccaccgcgttgttgatggtgggtgcggtgtggggcgtgatcctgctgggctagcccggcaatcctgacaacttcctgataaggccgtttcgatactgcgcgcactcctgttccgcggaacctgctcgtgcgtcaatgcctccgtttcccgcgatcccatccaatcgttctggtctgggccgccgcactgttcttcgccacgattggaaacattgccctctggaagacgctgtgggggctgatcgatctcaacagcctgcgcagcatgctgttcctggccagtctgccgccgctgctgttctgcctgttcaacctgctgctgacgccactgctggcactgccattcctgcgcaggccgctgctgttgctgctcgttgtcgtcagcgccgcgtgcagctacttcatgctgcactacaacgtgctgatcgatcgcagcatggtgcagaacgtgttcgagaccaatcaggccgaactgaacgcctatctgtcgctgccgctgctgttgaccctgctggcgctgggcgtgctgcccgctgccgggctcgccctggtgcgcaccaccagcggggccggttcgatacgttcgctgctggtgtggccggccaacgtcctggcgtcgcttgtggtgctgctggtgatcggcttttcgttctacaaggactactcctcgctgctgcgcaacaaccgctacatccgcgaccaggtactgccgttgaacgtggtgcgccatacccacggctacctgaagagcctctacagcacccgccagcaaccgttgcgcccaatcggcacggacgcgcggcgcgttccgggcccgcgcccgaagctggtggtcatggtcgtcggcgagaccgcgcgttcacagaacgtccagctcaacggctacccacgcgcgaccaatccccggctctcgcgcaaggatggcgtcatcagcttcagtgatgtttcctcatgcggaaccgcaacggcgatttcggtaccgtgcatgttctcgcagatgacccgccagcaatacgacgacgtccgcgcggcgaccgaggagaacgtgctggacatcctgcagcgtaccggcgtcggcgtgctctggcgcaacaacaacaatggcggctgcaagggcgtgtgcgagcgcgtgccgaccgaggacatgcccgcactcaaggtggccggccagtgcgtcaacgccgacggcacctgctacgacgacgtgctgctgcatcggctcggcgcacgcctcgacgccatccatggcgatgccctggtcgtgctgcatcaactcggcagccatgggccgacctactttgaacggtatcccgcagcgtcgcgggccttcagcccgacctgcgacagcaaccagatccagcactgcagcaacgaggcactggtcaacacctatgacaacaccctggtgcataccgaccaggtgctggcggagaccatcgacctgctgcagggctattcggaccaccgcgacgttgcgctgatctatgtctccgaccatggtgagtcgctcggcgaacgcggcatgtaccttcacggcacgccctacttcatcgccccgcgcgaacagacccaggtgccgatggtgatgtggctctcaacggagttcagccgcaacgcgggcctggacatggcctgcctgcgtgggaatgcgctgcgccgcgcctacagccacgacaatgtcttccattccctgctgggcctgttcggtgtcagcagcagcgtgtaccagcgcgatctggatgtcttcgccggctgccgggcgacgaccggcgcgccgctcgccaccgcgccggccaagcggcaccggctgatgccggtcaccgcccggaacgtggcgcgttactgtgcggccagggcgaaatccaggccggcgcataccgccgccacctgggcgtcgttgcattcctgcgggttggtgcgcgggctgtccgggtagacctcggtggtggtggcaaagcgtgcatcggtgaagccggcgcaggcaccaatcgaacgcgattcgccccagaccacgcccggcgactgcaacggcaggccgaccaggttgccctcggcgtcggccggggcgatatgggtgaccggggcgacggcggcgatcagggccttctggaactcggcctgcggatcctcgctgttgccgatcacgtagaagccgtccggaatggtgtcgcgctcgaacggcttgccgtcgcgagcgcagcgggccggatcgaactcgtgcaggtcgctgtcggtggtctcgtgcaggtccaggtgcaccagcaggttcggcttgcgctcggccacccagcgcatcagcgcggcggcttcctcgatctggccgccgtcacggaagctgcggttcgggtcgacggcatccgggttccagcgctggatgcgctcgtagccccatgggctgacgcacggcgccacgatcaggttcagccggcccaggtagcgctcggcctgctgttccaggaactgcagggcgccatgcacgccactggtctcatagccgtgcacgccgccggtgatcagcgcggtcggcagcgccgggttccagtcgtggttgaccacggcgaacagcgggtaatggtccggcgcgtagtccagctgaccgtactggatcacatcgaagctgtcgtccaggcgttcaagcgcggccaccacatcgtcgtggtagctgcgctggcgctgctggcgggcccgccactgtgcgcgttccgcgtcgccccagggctgtccgggggtgccgatcgggtagaactgcgcaacagtcattggggaactccaggggtcgaacggatgggtgcagccggacattctaagccttgtcgcgcccgcgggcccctcccccggccccgccttcatccagccggggtcatctggttgtaaaatcaacggtttttggcccctcaccccttgatggcgaacgcagcgcagccggtcctgggtggaccggagttcctccgcctgctcgcccgtctcagcgacggcgcgatgccggccaccagtcccgccctgaccgatcgcctcggccagtgggtggactggagccgcgccgtggccctgtccggggcgctcggcggacgcctgcccgagcccggtgaagccgccgaagcgctcgaggatgtgctggccgactgcgcgcaggcgcacgccagcctgctggcctcgatcagtgaggatgccgaagccgagcgcctgctggacctggccgaagccgccgctgtacccaacttcgcctcgctgcgccagcgctatcgggtgctgcagcaggccatccagaccgccaccgggcgcctgcgcggccgcctgcgcgaccagctggtgcaggtttcgcccgagctggcgcggctggccgaggtcgatgcggtgatggaacagacccttaccccgcgcgagcacagcctgctggccacggcgccggcggtgctcggcgcccggtttgaacgcgtgcacggccagcccggctggcgcgcggccttccgccatgacatgcgcaccctgctgctcgccgagctgcagctgcgcttccacccgatcgaagggctgcaagacgccctgcgctcccactgaccggaacaccatgtccagaactgctttccatgtcgttgttttccttgtcggcctgctggccgtgtgctggatcggcattggctacgtttcggtgcatccgctgggtgcagcggtggcggcgatcatcgcggcctgctacgtcgccggtggcgtggagctgtatcgctaccgccaggccagcaacggcctgcgcagcgcgctgaacgacctgtccagcgcgaaggaaagcctcgccgcctggctggaacgcgtgccgctgggcctgcgcaacgccgtgcgcctgcgcgtggaaggcgagcgcaccgccctgcccgcaccggtgctgaccccatacctggttggcctgctggtgctgctgggcatgctcggcaccctgctgggcatgatggacacgctgcgtggcaccggcctggcgctgcagagtgcgaccgacatggccgcgatccgcggctcgctggcctcgccggtgcagggcctggcggtggcattcggtacctcgatcgccggtgtggccagctcggccatgctcggcctgctggcggcactgctgcgtcgtgaccgcctgcaggccgtgcagcagctggaccgcgccattgccggcgacctgcatccgtactcgcaggcctggcagcgcgccgaatcgctgcgcctgctgcaggcacagtctgcggcgctgccggcgctggtcgaccgcctgcaggcgatgaccagcacttttgaacagcacagtgcggccgccaatgagcgcctgctggccggccaggccgagttcctgacccagagccaggccctgcaggaacgcctggccgtctcgctgcagcagtcgctgcgcgaaggtgccgaagccagcgccgccgccatcggtggtgcgctgcagccgatggccgaaaccaccctggctggcctggcccatcacggcgaagcactgcatgcccgcgtcgagcaggccgtgcagcggcagctggccggcctgagcgagggtttcgagcgcagccgcgtcgccaccgaggccagctgggccaaggtggtgagcgagcagacccaggcacaacaggcgctggtcagtgatctgcgccagcacctgcaggccttcagcgatggccagggcacgcacgccgaagcactggtcgcgcgtctcggcgagcgcctgcaggccgatgcccgcggcaatgccgaggcatggcgcgccgccgccgaacagcagcaggcactgaacagcgcgctggtcgaacgccagcagcaggcgttgctggcctccagcgagcatctggacgcgcgcgcgcaggcgctgctacaggcgctggagcagcaccacagcaccagccaggcgctgctgcaggaccacgaactgcagcgttcgcagcagtggcaggccgcgcaggccgctgccgcggccgcgcacgccgaactgcaggctggcctggacagccgcgagcagcagcgccaggcgcgctgggacgcgatcaacgccgagctgcagcaggcccacgccgcgctgcaggcgcagctgcaggccggcgacgaacagcgcctgcagcgctggagcgaagccttgcagcacgtttccagcgacctgaccgagcgcctgcaggccaacggcgaacacctggccgcgcagcagcagcaggtctgcgacaccctggcggccaccgcacagcagatcggcgagaacggtcgcgcgcaggccagcgccacgctggctgaagtgtctaccctgctgcagaccgccgcggccgctccgaaggctgctgccgacgtcatcaacgagctgcgcagcacgctgtccgagagcctggtgcgtgacaacgcgatgctggaagagcgcggccgcctgctggccaccgtgcagaccctgctggatgcgatcaatcacgcttcgcacgagcagcgcaccgctgtggacgcactggtcggtggctcggccgagctgctggagcgcgttggcaatcgcttcaccgaccatatcgccgcagagaccggcaagctggatggaattgccgcagcgctcaacggcagcgctgccgaagtgggccagctggccggcacgttcggcgaagcggtcgcgcagttcggcagtgccgccaccgagctgtccggccgcctggaacagatcggcggcgcactggatgcctcgctggcccgcagcgacgagcagctggcctactacgtagcccaggcgcgcgaggtggtcgacctcagcctgctgtcgcagaagcaggtgatggaagaactgcagcaactggccgcgcgccgcggcaaggccggcagcgcatgagcgacgagctggaggtcgacggcggttcgcatgccccgatctgggcagccttcggcgacctgatgtcggtgctgctgggcgcgttcgtgctgatactggtcggtgtggtcgccgtgcagctggagctgtcgcagcgactggaccaggaagtgaaacagcgccaggccgaagccaagcgcctgcagacgctggagcaagcgttggctggaccgctggcggccggccgcgtgacgctggtggatggccgcatcggcatcagcggcagcgtgctgttcgcgctgaactccgaccagctgcagccggaaggccaggagctgctgcgcagcctggccgcaccgctggccgcctacctgggcagccgcgaagagatcctgatggtcagcggcttcaccgatgacgcgccggtacgcgaaggcaaccggcgtttcgccgacaactgggagctgtcggcgcagcgctcgctgaccgtgacccgcaccctgatcgccgatggcgtaccggctgacgccgtgttcgccgctgcgttcggcagcgagcagccggtcagttccaatgccgatgaggaaggccgcgcacgcaaccgtcgcgtcgagatcgcgccgattcccaagcccaaggccccggatgccaagtaagtcgccagcgctcgaaggcctgcgcgcactggtgcgcgaccttgatgcagggtcgcgctcgctgccgcattacccgcaggtgccgatgctgcagcaggtgcagcgcgagtggacggagctgcgcagcgaactgcaggtgcgccgctccctgcgcacagaggccccggctgacggcggcccgctgaactcggcggtgctggtgcagcgcatgctggacacgatgcaggccaccagccccggctacctgcgccacttcatcgactacgtggacaccttgtcctggctgcaggcactgcaggatggcgccgccagcggtgcggatagcgcaaagccgaagcgcacgcgcaagccgcgccaaacgccgaaggagtagcgccggccgctgggcggcagctacgcatctccgcgcgggtcatggggttgccggccagcggccggcactaccatcgcgggtgctctgtgcgcggaacacgatctgcgctgcgcttcggttctgccgtggtactgccggccgctggccggcagctacgcgtctccgcgcgggtcatggggttgccggccagcggccggcactaccatcgagggtgctctctgcgccgcagcgcgatctgcgctgcgcttcgattctgccgtggtagtgccggccgctggccggcatcacacccagtccgaccacgcatgcggatactcgccaatctgcccagcaagaccggcgcgtaccggattccccaggatgtacagcgcttgccgcgccatcgactcctcggccctcacggcatgatcgaagtagccgggctgccacaccgtacttcgacggcccgccaggcgattcagggcaagcgcgctcgacgatttcatccggcgtgcgatgtctggaaggtcagctgcgcgcagctcgaacatccagtggacgtgatccggcatgacgacccatgcgtgtgaccgtacgagcccgcgctgctcgatgtaatcgaactggtcgatcacacatgctgcagcagctttgctttcaaggagccggcggcgctgatgcgtggtagttgtcagaacgtagacctggccgatgatcgagtgacggcccaggcggaggcgatggctgctcatgcgccatggtgggtcgatcattgggcgttggctgtcgggccctgcctcgatggaggttgggagatgtctgaagttgaatgaggttgccggccagcggccggcactaccgggggccgtaggttgccggccagcggccggcacgaccacagccggcaggcggccgtcggggctcagccgcgcagggtggcgccgccgtcgacgtacaggtcgctcatggccacgtgcccggcctgatcggagagcaggaacatcaccgagtgcgcgatgtcctcgggggtggccagcttgcgcagtggaatgccggccttgtaggtctccaggctgccggcgatcacccgctcggcaccgtgctcgtcctgccacatgccggtctgcatcggggtcaacgtcgatcccggggcgacgatgttgcagcggattcccagcggcgccagctccagcccgaggcagcgggtgaacatggtggcggcggccttggatgccgcataggcggccatcccgtgtcgcggcacaccggccgcattcgagctgacggtaaccatcgcgccctgcccgcgcggcgacatcacccgcgccagggcacgcccgacatggaacacgccgtcggtgttcaccgcgaacacccggcgccagtcgtcatcgccggtctcggtcacgccgcccacatgcagcacaccggccacgctggcggccagcatgatcggcccgatgctggactcgacccgatccaccaaggcgtcgacggccgcactgtcggtcacgtcaagagcaaacgcctgcacacgtgcatccgcgaacatgggtgcctcgcgatcggtcgccaccacggtgcaaccggccgcggccaacagccgtaccagtgcctcaccgatgcccccggcggcaccggtcaccagcgccacacgaccttcaaaaccggtcaattgcatgttgcggtctcctgttgctcgtcccagtggcgcaaccgcgccgacaaccacggtgccagctgcgccaccgcatcgcggccggtcagttcggcgtgcaggaacggcagttccagtgcctgcaccttgcgcgcgtggctccgccacaacgccgactgcagctgtggccgcgcctggtgatcccggccagcgcggacgtgcaccagcgtgccctcgaacggccggtggatatgttcacggatcagccgattggtaccggtcaccgcgcgcaccacgccgtcaagcaccacatccggcaggctgcccagtgcactcccgccgcgacgcaggaacgcgagtatgcgttcccggctgtccagttccggatgcgcatccgggtcgtggccggcaatcgccagtagtgcccgcagtgcggcgatggcgtccggttcaggctcggcccgccagcactcgctgggataggcgtccagcaacaccagttcgccgacgtcgcggccgatctcatgcagccgcaccgccatcgcctgggcgaggatgccgcccaccgaccagcccagcagatgcaccggccccttcggctgtagtgcgaccacgcgctgtacgtaatcgttggccatcgcctcgatgctgctcggcagtggcagccgcgcgtccagtgccggcgactgcaggccatacaccgggcgggctggttgcagtgcccgggcgagggtgcggtagttccaggcgatgccaccggccgggtgcagcacgaacagcggagtgggcccggcagcgtcggttgcggccagcgcgatcaccggccccagcgcgtgatcggccagcgcgggtggcgcggcaatacgaaccgccagcgcggccacggtgggctgggcaaacaaggcgcccaaacccagatcgcagcgccagcgctgctcgatcgccagcagcaggtgcaccgccgacagcgagtcaccgccgagactgaagaagtccgcatccaccgccaccggcgcctcacgcccaagcgcctgtgcgaacagcaacgccagctcttgttccaacggcgtgcgcggcgccaagccggcaacttcacgttgcggtggcttcggcaacgcgttgcggtcgagcttgccgttggcggtcaccggccagtggtccacaccaacgatggccgagggcaccatgtagtcaggcacacgcgtggcgaggtggctgcgcagcattacggcatcggcaagcgcggtcggcacataggccaccagacgcgcttcgccgggagcatcctggcgtagctgcacttccacccgctccatgcccggcagttcgcgcaaagccgcctcgatctcgcccagttcgatgcgcaggccgcgcagtttcacctgatggtcgctgcggcccaggtactccaccgcaccatcgcggcgccagcgcgccacgtcgccggtgcggtagatgcgctcgcccgccaggaaaggatcggcaaggaagcgttcggcggtcagatcgtcgcgaccgagatagccgcgtgccagctgcacgccgcccaggtacaggtcaccggccacaccgaccggcaccgcctgcatccgggcgtccagcacgtacaggcgggtgttccagaccgggaagccgatcggcaccggccgcgagcgatcctgcgctgacgccggccaatagctgacgtccactgcggcctcggtcgggccatacaggttgtgcagttctgcgtgcacgcgcgcatggaagcggtcgcgcaacgcagcgtccagcgcctcgccactggtgaatacgcggcgcagctgcaaaccttcggaggccggcgcagcgaggaaggcgtcgagcatcgacggcacgaaatgcgcggtggtgatgccatggccccggatcaagcgcgccagttcagtgggatcgcgatgcgcatcgggcctggcaaccaccagcgttgccccgcacagcagcggcaggaagaattcccagaccgagacatcgaaggtggccggggtcttctgcagcacgcggtcatcggcgccgatgtcgtagtgctcgcgcatccacagcaggcgattgacgatcgcgcggtgttcgacgaccacgcccttgggctcgccggtcgaaccggaggtatagatcacataggcggcatcgctgggcgcaggatccgcccatggcgccgcgaaactcagcgcggtccactgctccggcgcgagcaccggcacaccggccacgcgcaccgatacgtctggcgcagccagtacgcacaccggctgcgccgacgcaagaatacgtgccaaccgctcgtcaggatgggcaaggtccagcggaagataggccgcgcctgcgcgcagcaccgcgaccagcgcgagcaccagttccagcgagcgcggcaatgccaccgcgactacgctgcccgggccgacgcccatcccgcgcagttgtgcggcaagcgcgaaactgcgcgcttccagcgttgcatagtcgagcgtagtgccgccgaacaccagcgccggcgcgtgcggatcccgatccatgccctgctgcagcagttcaaccagggtagtctcgggaagcgcgtgcgcggtggcattgaaaccgtgcagcacctgctgcgcctcctcaagcgtcgccaacggcacggctgcaatatcgtcagcctgcaatgctgccgacacgaaatgcagcaaccgcgctgcatgcgcatcgacatcctcgcgactgtacagcgcgggattggcctcgatctccagatcgagaaggtgctggccatcgccacggaagcccagtgtcagatcatccaccggcccggtgcacagcacctccagcgtcgcctgcacgccggccagcgccagcggcttgtagaacggctgcacattcaccagcggaccgtgcaggcgctgctgcgcgccgaccagccccaggtcgcggcgcagctgctcactgcggtaacggccgtgcttgcgaccctggctgagctgccggcccaggccgcgggtgaaggcctcgacgctgccctcgccggccgctacgcgcagcggcaacacgttcatcaccatcgccggcacccgcgccgacgcgttgccgagccggcccatgtagggcacgcccagcaccacttcatcggcagcgctcatccgccgcaggtactcggccgccagcgcggccagcacatccggccagggctgcagccaacgtgccgacgcctgcagcagctgctcgcggaaggccgcatcgagcggccgcacccagcgcagcgcatcgtcgctggccgccacggtgcctgccaggcccacgcccgccggcgccccctgcaactgctcgcgccaccagcgcccggcctgcgcacgacgcgggtcggcacgataggcggcgtcatccgccagcacgcccgccagccctggcagcggttcagccatgcgaccggcatgcaacgcgcacacgcgatcggtgaacagcgccatgccgtagccatcggcggccagatgatgcacgcgcaggtaccagacccagcgctgcccgcccaggtcaaacaacacctgctgactgatccggtcacgggtgggatcgaccgggctcagacggtcggtgtgcatcaggttgcgtgccgcagcggcgggatccgccgcggtggaaacatcgcgcaccgaaagcagcggcacgtgtgccgggtcatgccactgcagcggctggccatcggccccttcggcaaagcgcaatgcgaaggcctgggcctcgcctgcagcctggtctgccgctgcaatgaacgcggccacgtccaacgggccgtcgatccacaccgcgtgcgcggtattgaatgacggattgtccggtgccagccgctgtgcgaaccacagtccggcctgggcctcggtcaatgccaccggtgtggccagcgcagcggcgttcatgcgttctgcgcggcctgcagttgctgcaccacagcccaccactggcgcagcgtggtgtgctcggccagctgcgagaactcaatgggcaggccggtgttgccccaggccaggaccaggccgagcatgcgcatcgagtccaggtccaggtcgatcaggttgtcgtcgtcaccgatctcggccggggcacattccagcacgcgcgccacgtcggcacgcatgcgctccagatccagcacctcacccgtggcggccatcacagcacctccagcaactggtcggtggtcatcggtacgccacaggtgcgggcaatccagtgcagggcctgatcgtggtcagcacgcgagaaatccgctaccgcatcggccgcgatgaacgcctcgatgtcgcgctggaaggcttcgaccacggtggccgtgcagcctatatgcgcatacacgccagtgaccagcagctggtcgcgtccacgcacccgcatcagcgtctccaggttgctgcgctggaacgcgctgtagcggtgcttcaccagcacgtgctcgccaggctgcggtgccagtgcctcgatgattggttcatggtcggcgctgcgacgcatgcctggtccccacaggtcggcctgcaggccacggtcacggcggtcctggtcgccatgctgggcggtgtagaacaccggaatgccgtgcgcgcggcaatgcgccagcagccgtgcgatgttgtccactgccggccgcagcggtgcgttgccggcgtcgaatgcggccaggaaatagcgctgcatgtcgtgcaccagcagggcggcacgatcgcgctgcgggcgccacgggccgcgcgcctgcggcagctcggcggcagtcggcaaggggtaatcggtgatacggggcagcgccatcagcgcgttcctcctgtctgttgcagatgacgcgcacgcagctgcgcgcgcagttcgcggcggctgatcttgccgaccgcggtggtatcgaaactgtcgacgaacacgacctggtcgggcaccttgaacgcggccaggccgcgcccgcgcatccaggccttcagtgccggggccttgatcggctcaccctgctggatcacgaacgcgcagctgcgctcaccgagatactcgtcaggaatggagaccacggcggcgtcgaatacgccggggtgggccagaaggtgatcttcgatctcctcggcggagattttctcgcccgcccggttgatgtggtcaccggcacggccctgcaccaccaggtagcctccgggcagctgctgcacgcggtcgccggtgcggtagaagccgtcgtcggtgaacgaacgcgcattggccaccgcatcgttgtggtagccacggatggtgtaagggccgcgggtcagcagatgccctacctcgccttccggcaccggctggtcatggtcatcgaccacgcgcacctcgtcgtccgggctgatcggccggccctggcaggctacgatcagttcttccggatcatccagccgtgtgtagttcaccaggccttcggccatgccgaacacctgctgcagcgtgcagccaagaccgtcaatcacccgccgtgcggcttccggcaccagtttggccccgcctacctgcagtacctgcaggctggacaggtcgtgcttgctggtggcggcggcctgtgcccacaacagcgccagcggcggcaccagcccacagcaggtcacttgctcgcgcgcgatcagcgggaaggccgcgtccggccccggaccggggctgagcaccacgcgggcaccggcatacagcgcgccgaagaaaccgggcgagctcatgggaaagttgtgcgcggccggcagcgcgaccagatacacgctgtcgcggtcgatgccgcagaggtcattgctggcacggaacgagtagatgtagtcgtcgtgggtgcgtggaatcagcttggacagcccggtgctgccgccggagatctgcaggaacgccaccgactgcgggtccgggtcggccggcagctggttgcggtctccctgcagcgcctcgagcgcggtgaactctgctgcatcgccatcgatgaccacgtggcgcagcgccggcacctcggcctgcagcgcccgcgccagcccgcgatgatcaaagccatcgtgcaggtcggcagtgatgtaggcactggcttcggccttgttggcgaagtgcaccagctcggtgatgcggtgcgccggcagcgcgtacaccggcaccaggccggcgcggaacagcccgcatacggtggcgatgaacccggcggtgttgcccagctgtaccagcacccgctcaccgggttgcaggccgagtgccagcagtccggcaccgatgcgaccggcctcgtgccacagctgcgcgtagctcaggcgcacatcgccagcgaccacggcgatgtcatcagcgtagcgttccgcacgctcacgcaggaacgccgggaaggtctcgccgcgccagtagcccgcctcgcgatagcgcgccaccagcgcatcgggccatgcctgctgcagtggcaggcgggaagaaacagtgggcgtgttcatgcagcaggctcgatgacgggcgcggcgtcgtggacgcccaacgcgttcaacagggcggcaaacttcgccgcggtttcggcgacctcggcctcgggctgcgactgggcaacgatgccggcgccggcgtacaggcgcagctgcgtgccctgcaggcgtgcgcagcggatcgccacataccagtcaccatccccttgcgcatccagccagccgaccgcaccggcgtagaagccacgcggcaccggctcaagctcgcggatacgctgcagtgccgccagccggggtgtaccgcagaccgccggcgttggatgcaactgcgccagcagctcggccgccgatgtctgcggatccttcagggtggcgtggatgcgggtgccgagatgccacatgctggcggtggcatgcagcaccgggcgcggctgcgcatcgatgtggctgcagtacggcgccaggccctcgatgatggcctcgaccacgtggcggtgctcgtcatggtccttgttcgaagccagcagcgcctgcgcggcgcgctcgtcctcggcggcatcggcactgcggcgcgcggacccggccagcgggtgcgacaacagctcggcgccacgcttgcgcagcagcagctccggtgttgcgccgaccagccaggccggtgcgtgccccggttcaaccggaagcggcaccgcataggtcgccaccgagggatccgcgcccaaccgcgccagcagcacctctggagacagcgcatggcggctgtgcgccagcaggctgcgcgccagcaccaccttgtgcaggtcctggtcgggcgcgcgcagcgccttcactgcctcggcaaccgcggctgcatagtcctgcgctgcgggctccgcctgcagcgggccctgcagcgccggcgccgcccgtggttgcaacggcagggccggcagcaggcgctcgggctggtacaacgcgtcgtcggcacgcggttcgaatggcaccgcaccgaccagcaggcccggaccgccacgctgctgggcgaagaaggccgcaacgcgctccgccagggttgccagcgcgccacccggcagcgcgaggcggcaaccgcgtgcgtgcacatgctggccggcatgctgcagcaggaacaacgacgcgtcgtcagtgctctcgagcggcgcgggcgcagcctccggccacgcgccctgcatcagggaatcgttcatggggtctccttcatccgatgcgctgcagccagcgcgcacagcaacagcagcagcgcgccgaccagcagatatggcaggctgggcccgccgcgatacaacagcgtgccgagcatcggcccggccaccatgcccagcccctgcgcggcagcgaccgtgcccgccgcggcaccctgctcgtgcgcttccaccgcgtcggcggccagcgcctggaacgaggggaatacgaagcccatgccgaacgcggccagcgcgtatgccgccggcaactgccagccctgctgcacgcccgccaccgaagcaaagccaatgccggaaatcagcgcgccgaggatgatccagcggcgcggatgcacctccagcttcatcaccagcgcctgcgccaggatcaggccgatgccgaccgcggtcagcgcgatgccggccatgcgtgcaccagcggcagcatccaggcccaggcgatcaatcgcgaaaaagcccaccgtcacctgcgcgatggtcaccgagaccatggcgatgagcgccgccagctgcggcaggcgcaggcgcgggtcgaggcggctcatcggcgcgcggcgctgtgcggacgcgccaaccaccggcggtgtagccggcagccgccaggccagcaatgccagtgccagcagcggcagcaacgcggccacgtacagcgccagcgaaaggttggtataggcaagccagccggcagcggccggcccgagcaccatgcccagcgcattggcgctgcccagtcgggcgaggaatttcgcacgttggccggtcggtgccttgtcggcgatgatcgcggctgcggtgggcggcaccgccgcgtagaacaggccgatcaggcctcgcgcaccgaccagcaccagcaccgataccagtaccggcggcaccgcctgcagggcaacgtcgatgaacaccgccagcgcgatgtagaccacggtgtaggcgctcatcgccagcatcagcacgcgcttgcggccgatgcggtcgctgagctggccccatgggcgcgcggccagcatccacaacgcgcccgcggcggtgaccgacagtccggcatgccactcggacagcccgagcatgcggaccaccggaccgatcacggcgacgaaggacatcatcgccatggtgccgatcagggcggccactaccagcgccggcaagccgggaacgacgggacgtgcgtgcatggaacaccagccgtaacaggaagggatcgccgggcgcacctgcgccccgcccggcgccggccctgctcaggaccggacgccatcctcaaatgataacggctcgtatttgcatttgatacccattctcttgaacgggcacgcaacagcgacttcagcgcaccgcgcgcaggcccaacaggccacggcgcttgaaccaccattccaatggcagcgtcaccagcggcgggatggctgccagtagcgccagcgcactggcccaccacggccagcgcaggcgcagcgccgcgaacagcgtcaccgccacatagagcaggaacgccacgccgtgcaggggtccgaacagcttcaccagcgccacgttggccatggggccgtacttcatccacatgccgatgagcaggccggcccaggtcacggcctcgatgaaagcgaccgcggcgaacaggcgtccgctcgggtgcatgggggaacgttgggtcacacggggctccggcagcggggtatcaaatgcgaatgatacgcagatgcacactgcatgtagagccgagccgtgctcgactgctggagcgtgtccaccaaggtggacacctaccggggcatattcggcagaacctgctccccgatctcacgcaacaccgcgtccatctgccgcccgttgtcgaccagattgaacatcacgtgcgccacgccctgcccatgcacgcgcagcagatagtcacgcaggccatcgcggccgaccttcaggcccagcggcagcggctcggctggcgcctgcggatctgcctgcagatccagaagcatcgactgcacgaatggcttgcccggcccaccgcgctgcaccagcgcctgctgccacaggccgatgcgcccctcctgcgcggcctcctcacgatgataggtggcccagccttcggcctcgcgcgcgatccactgcaggctctgccgtgcggtacccaccaccagcatcgggatgcgggttgccggcgccggcagcacgtcgaagccacccgtggcctgcagtacggcgatccgcgcatcggcctccggtgacaatgccgcgcgcagcaacgtccagcgctcacggaaggtcgccgccctgccctccagatcctcgccgaaggcggcgaattcttccgggcggtcacccgaacccaggcccagcacgaaccgccctgcactgatccggtccaggctcaaggccgacttcgccacctgcaacggctggcgcaacggcaacacgatggcggcggtaccgaccacgatgcgcgtggtcgcggcggccagcatgcccagccacaggaaggggtcgtccagcgcgctcgccgtcgcgtccggaccctgcggcaccatcagcggtacatcgcgcgcccacaacgcggcgaaaccaagatcgtcggccagccgcgcaatgcgccgcgccgcgcacggatcggccagcccatgcgccgcaacgggcgtcatcaggcccaggctcagtccctgttgcggaaacaacgaagcgtaggcgggattgaattcactcatgggaccagcttagcgtgcaggcaaccggcgacgatgacacgccacacaccacaggaagatcgctgcatgccgaggatccgccccgcccacatcgatgacctgcccgcgatgagcgcggtatgcctggccgcattcactgcggccgtcgcgccctcgctcagcgcggccggcattgctacgttcggcagtgtcgccgccgccgatgcgttcgctgcacgcctgcagggtgacaaccacatcctggtggccgagcaggatggccgcatcctcggcgtggtagagctgaaggaaggccgccacctggcgatgctgttcgtcgatcccgcctgccagggccagggcatcggccatgccctgttcgaagccgtgctgccgcacctgcgcacaccggtgctgaccgtgcgcgcctcgctcaacgcagtgcctacctacctgcgctatggcttcgtgctggacggtgatatcggcgagttcaacgggctggtgtaccagcagatggtgcgggcagccgcctgagggcagcgcgtgtcatgccccgctgcacggccgatataagcaaactgaatcagcacactccccggccattcctacaatggactgtcccccattcgagatgccgccgatgcgcgtcgcgctttccgtgttgctgctggcttcggcgctgagcgcctgcaccccggccccggtgtccaccgccagctccgccgaggcgcccgcgccggcgtccgccatcgcctggcgccagggcgatgtggacgatgccttcgccgaggccgccgacagcggaaagccggtgctgctgtactggggcgcggtctggtgcccgccgtgcaaccagctcaaggccggcctgttcaaggacccggcgttcatcgcgttgaccggcaagttcgtgccggtctacctggatggcgacgaggaaggggcacaggcctggggcgaacgcttcggggtgcgcggctatccgaccctgatcgtgctggacccacaacgcactgagctcacccgcgtggccggcggcaacgacgcggccgaactgacccgtgcgctgaccgtcgcggccgggcgccgcagcgccatcgccgccaccctggcgacggcactggccacgccggacaggctggccgccgaagactggcaggtgctgggcgactacggctgggaagtcgacgccaaccgcctggccggcgagcgcaggagccaggatgtgctgcgccagctgtccaaggccgcacccgacgcggcgctgcaacgccgcttcgccctgctggccctggccaccgccgacacgcccgccagctcgcccaccgaggtgcgtgagctgctgcaggcagtgctggcgcaacctgccgaagtccgtcgtaaccgcgaactgctgggctacgcgggcgcgacgctggtcaagcaggccagtgcggggccggccaccagcaacacgctgggacagcagctgctggtcgcactggagcgcgcagatgccgagcgcggcaaccgtgccgacgacgcgctgtcgcgtgcgctgaccgaagtgtcgctggcccgtcagcagcagcccaacggcgcactgcccgcggccctggttgagcgggtcaagcagcgcgtggccgctgccgatgccgccgccaccgatgcgcatgcacgccaggccacgatcagcagcgcggtctacgcactgcgccaggtcggcgacgacgcgggcgccgaggcgctgttgctggccgagctgaagcgcagcgagcagccgtactactacatgcccgagctggccgaactggccgagcagcgcggcgacaccgccggcgcactggagtggctgaagcgcgcctacgatggcgcgcagggcccggccacccgcgtacagtggggcgtgctgtacgtggagggcctgttgaagctcgcgccggacgatgcaccacgcatcgagcaggccaccgcctcgctgatcgccgaactggaagcgcagccgtcgggctaccaccagcgtacccgccagcgtttcgagcgcctggccgggcagttgaagacgtggagcggcaagcaccagggcgccgaaacactggcgcggctgcagcagcggatgcagcaggcgtgcggggaacaggttgatggtgcgtgcaaggattggttgagttgatgaaggcgctggcggctggttcgcctgccggcgcttttgttgatccgtgtgggagggggcgggggcagcgcaacagcgcgccggtgaggttcgaaaagcgggttctggtagtgccggccgctggccggcaacccgaccttcgctgattgccggccagcggccggcactaccatgccgctcctgctcctgcctttgactccgtctccgcgccagcgcagggagctgtcctgcaggggctgatgggtcagcgcaggaccgttggcgccacggatggcgccatcgagcccccatggatgggttcacggcgtgtcctgcgctgacccatcagcccctgcctgccaggaagaatcaaggcgacgaacgcgcacgcatttcaatcccgccccttgacctcaaccaatgttgaggtgcgataacaatctccccacggccagcccctggccttccccacggagattgcttcgatgtcgtactcgcttcccccgctcccctacgcctacgacgcccttgagccgcacttcgatgcgcgcacgatggagatccatcacagcaagcaccaccaggcctacgtcaacaacctcaatgccgccatcgagcaggccggcatcgccgagctgccggtcgaggcgctgatcgccaacctcggtgccgtgcccgaggcgcagcgtggcgcggtccgcaacaacggcggtggccacgccaatcacagcctgttctggaccgtgctcagcgccgacggtggtgcacccgatgaggaactggccaccgccatcgaccgtgacctgggcagcttcgatgccttcaaggacgccttcagcaaggccgcgcagacccgtttcggcagcggctgggcctggctgaccagtgaccgcgatggccgcctgcaggtcgaaagcagcgccaaccaggacagcccgctgatgggtgcaaccgtgggcctgtccggcaataccccgatcctcgcgctggacgtctgggaacacgcctactacctgcactaccagaaccgtcgcccggactacatcggtgcgttcttcaacatcatcaactgggccgaggtcggccggcgctaccgccaggcccgggcctcatgagcggcgagacagtgccgtacgccgggccgtgggcgggggtcttccccgcaccggcgccggtgccgtcggtcgagatgccgccgcgtgccctgcggcggctgctcggccatttcccgaccggcgtggccatcgtctgcgcgcgcgatgcacagggcaagccggtcggcctgaccatcaactcgttcgtaccggtctcgctgcagccaccgctggtgctgtggaacctggcgttgcacgcgcagagcctgtccaccttccagcgcgccacccgctttgcaatcagcgtgctggcggccgaccaggaagcgctggcccggcgcttcgccgatccgcaggtccgcaatcgcttcgacggcctggcattgctggatgacgacgaggacgccgcaccccgcatcgccggtgcggtcgcccatctcacctgtacccgccacgcacagtggccggtgggcgatcacctgctgctggccggccgcatcatcgacgtgcacgagaacggcggcgcgccgctgctgttccatcgcggccgcttccagcccggcccggccgaactgctggtggaggtgcgcggatgaacatcgaagctctggaatgcatgctcgccgccggcaaggatggcgcgctgctgcgcttcggcctgggcaagggctggctggatgccggcaacccggtgcgcgcggccacccatctgggccgttgcgtcgtgcttgatccgcagtactcggcggcgtggaagctgctgggcaaggcctggctggccagtggccagccgcaggcggcgcgcgaagcctggcagcgcggattgagcgtggccggcagcaagggcgaccagcaggcacgcaaggaaatgcaggtgttcctgcgccgcctggaccgcgagcaggcggagccggcgaaggcgggctgagttgatcagcccgcgttggccgatgccggtgcggacatgatgtccgacatcggcaggcggcgcggcttgctcgggaatgcgtggcgcaggatgcgccagaccacctggccaaactggcgcggcagcgagccgttgttgtagtgctggccgtagcgacggcagatgtccttcacttccttggcaatggccgcgtagcggttggccggcagatccgggtagaagtggtgctcgatctggtggctgaggttgcccgacagcacgttgatcaggaagccgccgctgatgttggatgaaccgcgcagctggcgcaggtaccagtggccgcgcgattcattgcgcaggcattccttcgggaaggtttccgattcggcggtgaagtggccgcagaagatgatcacgtaggtccagatgttgcgcagtccgttggccaccatgttgcccagcatcacggtgaggaagaacgggccggccagcagcgggaagaacacgtagtccttcagcacctggcgggccattttccgcgccaccgggcgggtctgcagccacatcgcacggccgctgatacggcccttcagccagcggcccaggcgcaggtcctgcgcggccacgccccactggaacagcagcgcgaagatcggcgcgatgatcggctgcagcaggtagaacggcttccagcgctgctccgggaagatgcgcagcaggccataaccgatgtcatcgtccatgccacgcacgttggtataggtgtggtggcggaaattgtgggtcttgcgccagttgtcggcagtggcaacgatgtcccactcataggtattgccgttgagcttggggtcaccggtccagtcgaactggccgtgcatgacgttgtggcccagctccatgttctccaggatcttcgacagcgccagcagcagcgtgccggtgatcgcggccggccacagcagcggcatccagaacagtggcgagaacgccgccaggaacagcaggccacggccccccacgccaaaccagcgcacggcggcggccacgcggcggatgtagcgggtatcggaggcgccgaggctgccgatcacacggtcgcggatcgcgtcgagttcctcaccgaaggcatgcatctcggcagtactcagggcacggtcggtagcgcgggtcatggcaggcgtcctcagagatccagggtcaggtcggtggtcggtgcgctcacgcagatccgtaccggctgcgccgattcggactgcaggtcgccggtgcgcaggtggcgggtggcgccactgacgcggtcacagctgcaggtgttgcagatgcccatgcggcagccatgcctgggcttgatgccatgggcttccaagctttccagcaacgagctgccacgcggcacgctcagctggcggccactgcgcgccagcgtcagcacgacctccccttcactgctggcgtcacgcagcggtgcgggaggagtgaacgcttccgcctggaaaccggcaacctggtgcgccaggcgttcgcgggcggcggcaacgaagccgtccgggccgcaggccagtacatggcgctgcgccaacggggtgtcatcgcccgccacctgcaggtcgtgggcatcgatacgtgcggcgggcacatccccttcgcgggtggtcagcagatgcacacgcaggttcggctggctggcggccaacgcctgcagctcatcacggaactgcaggtgggcggcgctgcgttcccagtagaacaggtccaccggcgctgccagcgggcgctggcaggcgtcgcgcaacaggctgcgcatcggcgtgatgccactgccggcagccagcagcaacaccggcgccgcagccggcatgtggaactcgccgaaggcggcatcgaggcggaacagttcacccggctgcgcgtggttgaccaggtgctggctgacgaggccgccgtcgatcgccttgacggtgatcgccagctcgcgccgacccagtacggtggggctgtagctgcgctgccacaggcgcccttcaatctccacgcccagggtgacgtgctggccggcgcgcatgccggcccagtgccggttggtgcgcaggaccagggtcgccgcgccctcgccggccggctctcgccggaccaggcgggccaccggctcgcgcagggtccacaggggattgagctggcccgcccagaaatcgaacagcgacggcgagacccagcggtacggagagaacagggacggacggacgacagcgctcatgggcgaactatacgggcgcacatacacctgtgtatacatgtgtatattgaaccggattgggtatgattcagcctcgccccaccggaacccccatggccgccgccaccgccttgtcgacgcctgaagatgccaacagcccggcccgccgtacggtgagccgcgaggacctgctggccgccgccctgaaactgatcgggccgcaccgcagcctgtccacgctcagcctgcgcgaagtggcacgtgaggccggcatcgcgccgaacagcttctaccggcagttccgcgacatggacgaactggccgtggcgctgatcgacgccgccggccgttcgctgcggaccatcatcggcgaggcccgccagcgtgccacctccaccgccaccagcgtggtgcgggtttcggtggagaccttcatggaacagctgcgcgccgacgacaagctgctgcacgtactgctgcgcgaaggcgcggtgggttcggacgacttcaagcacgcggtcgaacgtgagctgcactatttcgaggaagagctgcagcacgacctggtgcgcctggccgcgctggacggcgccgtgctgcatgccccggaactggtggccaaggccatcacccggctggtgttcgcgatgggtgccaccgccatggacctgccgccggagaaggacccggagctgatcgaagagatctccacgatgatccgcatgatcatcgtcggcgcccgcacgcccgccgcgttccgccgcggctgacgatcgcccccggggtcggatccctttccaggggaaagggctctgaccccaaccacacagcaacaccaacctccgtgcatgaccacaggcagggttgcggctgccaaatgtaatgttataacaccgctatgatctgactcgatcggcgttccgctcggaatgactgcggcgtccttatatagcacttgctatattgataagccactgctttcatatgcgtcagccaggtcgccctcgccgcctttctttccccaaggacgacgccctcatgcccgttgccacgcccctcttccatcggctgcccctggccgccgccattgccctgaccctgccgctgcctgcactggccgccactccgaaaccgaccgaactggaccgtgtgcaggtcaaggtgagcaccgccacgcgcagcgaacgcctgctgtcggacgtgccgatccgcaccgaggtgctgcgcaaggaagacatcgcgctgcgcgcggccaccgacttctcgcgcgccgccgagctgatcaacggcctgcgcgtggagagcaactgccagaactgcaacaccagcgaagtgcagctgctgggcctgcccggtgcctacaaccagctgctgttcgatggcatcccgctgctgtccacgctgggcagcgtgtacggcctggaacagatcccggccgggttcgtcgaccgcatcgaagtggtcaagggcggtggctcggcgctgtacggcccgggtgcggttgccggtgtgatcaacctgattccgccgctgccggcgcgcagtggtggccatgtgcaggccggcgtggatgtcctgaaaggtacgccgcagaagaacgccgacgtgcggctggacctggtggccaaggaagtagacgccggcctgtccgtgattgcccagcgcaactggaacaacggcatcgactacaacggtgacggctacaccgagatcacccgcaagaacctcaacgtcggcgggctgcaggcctggtacgcgcccacgccgggcacgcggctgcgcctggacctgcaggtgaccgatgaaacccgccgcggtggcaaccgcctggaccagcccgaatacctggccaacatcgccgaatcgctggatacgaaataccggcgcggcagtgtgtcgtgggaccaggagatcactgccgacgtcgatttccgcctggcctacgccttcgccgacatcgaccgcgacagcttctacggcggtctcggcgacgtagtcaccgatccgtccgcacccggctatgacccgtcgcagctggaccgcaacgtggccggcagcgcggcctcgcgttcgtggcgccagtacggccgcacccacaacccgctgcactacatcgacagccagttgaactggcggctgggcgcgcatgcgctggccttcggcgtgcagtacaagcacgaggtgctgcgcgacgacaaccgcaccggtgacgggcagcctcttgcggtgctggaggatgcgaccttccacaacctgggcgcgttcatccaggacgaatggagcctgcgcgacaacgtcgacctggtgctgggtgcacgcgtggacaagagctcggaactggacagcgcggtgttctcgccgcgcatcgcgctggcctggcaggctacaccgaacctgaaatggcgggcgggcatcgccaccggcttccgtgctccggagatcttcgttgaggatgtgcacgtcgatacgctcggcggcgagcaggtgcgcgtacgcaataccgatggcctgaaggaagagcgcgcgttgaccaccctgttcggcttcgactggcgctcggacccggccaatccggtgtggagctgggatgctaccgcctcctatgcacgcatccgcgataccttcgcgctgggcgagatccagcgcggcgatgacggccagctgagccagctgcgttacaacgcctccggctcgaacgtgctgggtgcggaaaccaacctcggctggcagccgtcgccgcagtggcgcctgaccgccggcgcctcgtggtaccgctcgcgcttccgcgagccgcagcgcatcttcgacgacagcggcgacggtggcgacaccgtgatcgaaagccgcgactacctgaagactccgcgctggaccggcttggcccagctcagctggatgccggccgaaccgtgggagaccttcgtcgcgctgcgccataccgggccgatgtcggtgctgaacaaccggttgggcgaactgcaccgcacgcgttcgttcctggtcaccgatctcggggcgcgctggcaccgtcacctgggcgcacaggcgcagcaggaagtgtcggtggccgcgggcgtcaagaacgtgttcgatcagcgccagaaggatctggaagtgggcgcgctgcgtgacagcgactatgtctacgggccgcgcttcgcgcgctcgtggtatgtcaacctgcgctatgcgttctgaagcgctgcgagcgttggtgctggcctgtgccgtgctgccggccgcaccgacggtggctgcggacctgcacgcgcaggtctcggcctcgttgatgcggccggagcagcgctcgctgcggccgatgcagtggtcgccgccgccgaagctggtcgcgctgtacttcggtgccgactggtgcgcaccgtgccatgcgttcgtccccacgctgcgcagcgtgcgcgacgcattgcgcgaagccggcgccgataccgaagtggtgtacgtcagcctggatgagagcgagagcgcgctgcgccgctacatgcacgcgcaggacatgccgtggccggtgctggacccgcgccgcgccgcgcgcatgccggcgctgcaggcattggccgggctggcaccgccgaacctggtactgatcgatgccgacggcacggtgctggccaacggctggcaaggccggcgctatgaaggcctgcagccggtgttgaaggaatggatgaaacgggcgtgtgcgcagcagcaggcgcgctgcccgcccgatctgtagagtcgagccacgctcgacgcattcgatcaccgtgcgaacggcagccgagcatggctcggctctacaaaaaccgggatcgcgcgaacggccggaggccatggcccggcgctaccgttacggcgcctcgccctcggccttgcgcacgaaggcttcgaacaaggccagcgtctgctcgctcacatggtgctcgatgccctcggcatcgcgccgcgcggtatccgcgtccacgcccagcgccagcaggaaacgctccacggtctggtgccgctggcggctggcgtgggccagcgcctcgccttccggggtcaggaacacgccacggtacggccgctgtaccacccagccatcacgggccaggcgccgcagcatcttcgccacggtgggctgggccacgcccagtcgggtggcgatgtcgacctggcgggcctcgccgccgtcggccagcaggtccgaaatcagctcgacatagtcctccaccagttccatccggtgcgcctcgcgcacttgccggaagctctcgacctggcgctcggcctcgatcaagggggtgcttttcagcgatgtcgaatcgtcggtcttgcccacgcctgcgcctgtccttccggtgcaatccggtgttgaacctgaattctggaccagtcacacgacaaagacgattgtttcacattgctaatgactatagcagaagctatattcggacccatgaacaccctggcgccccgcgacccttcggcctccactccggccagcctgggtgcgctcaacgcctcggtcgcggtgcccgacaagggccattggtggttccgcctgctggccttcctcggcccgggctacatgatctcggtcggctacatggaccctggcaactgggccactgacctcgccggcggttcgcgcttcggctacctgctgctgtcggtcatcctcgtctccaacctgatggcggtgatcctgcaggcgctgtcggcgcggctcggcatcgccaccggcatggacctggcgcaggcctgccgcgcgcgttaccccaagccggtgaacctggcgctgtgggcgctgtgcgaggcggcaatcatcgcctgcgacctggccgaggtgatcggcaccgccatcgcactgaaactgctgttcgatctgccactgctgtggggtgcggtgatcaccgcgctggacacgctgctggtgctgctgctgatgaaccgcggcttccgtgcgctggaagcgttcgtgatcgcgctgctgatggtgatcttcggctgcttcgtggtgcagatcgcgatggcggcgccgccggtgatggcggtgctgggcggcttcattccgcgcgcgcaggtggtgaccgatccgcacgcgctgtacatcgcgatcggcatcattggtgccaccgtgatgccgcacaacctgtacctgcattcgtccatcgtgcagacccgcgcctacccacgtaccgatgaaggccgccgcagtgcgctgcgctgggcggtgaccgacagcaccctcgcgctgaccctggcgctgttcatcaacgccagcatcctgatcctggcggcggcggtgttccatgccaatggccgatttgatgtggaagacatcgagcaggcgcaccagctgctggcaccgatgctgggtgtgggcgcggcggcgacgttgttcgcggtggccctgctggcctcgggcctgaattcgacggtgaccgccacgctggccggccagatcgtgatggaaggcttcctgcacctgcgaatgccgccgtggctgcgtcggctgatcacgcgtgcgctggccatcatcccggtggtggtggtgatcctgctgttcggcgaccagggcgcggtgaagctgctggtgctgagccaagtggtgctgtcgatgcagttgccgttcgcgatcatcccgctggtacggatcgtgaccgacaaggtgacgatgggcgcgctggtcgcaccgcgctggctgggcgcgatcgcttgggtgatcgcgctggtgatcgtggtgttgaacgtgaagctgctggtggacaccttcgccggggcgtaaaccgcatccctggggtcggactccctgccgcaggcaagggctccgaccccgccatctccatgctacagatgcaacgcaatcgcggcctcgatctgctgcggcgactggaaccctgccaggcgggtacgttcgtccccgtcacggaacagcgagagcgtcggcgtctgccgcagccccagttccctgaagaacgcctcgcccagcacctccagctgcacgcgcagcagcgtggtgccctgccccgcgacgctgttggccacccggtgcagcgacatctccagcatccggcaccccgggcactggtccttgtggaagtccaccagtacgcgcgggtgttcggccagcagctgctggaactgctcaggcgtggtggcgtcgatgatctgcatcgctgttgctccagtaatgggccaggaccgcatcggtccaagcctcgatggccgcggcatggcgctcgccatgcggcatctgttcgatctccagcggcggatagtcgctgtggaagtagcggatcagccggtgcacagcaccgcagtagtactcctgcccccactgtgtctcgccggtaccgaacaccgccagctgccgcggccgctcgccgcgctcggcgatgccagccacccatgccttcatctccgaaggcgtgcggccggcgttgtcggtccagcagcccagcagcaccaggtcggcctcgtcggccgccagggacggcgcctgctgcaggtcgtcggcctcctgccagtgcacggcatggcctgcagcgcggcaacgctcggcaatctgccggccaagctcgcgggtgttgccgctcagtgaggccaccaccagcaggatgctcagcgccgtgccggactcagaggtcgtcgaagccgttgtcgacgttggtcttcttgtaacttgcattgcgcatctcgaagaagtcggtcttggtctcggtgaagttgtcagcgtaggccttgatccacggcatcacgttgtcggtggtgtcgctgtacaggcgctcgatgccgagcatgccggccatcttgttggcgcggtacttcacgtagcgcgtcatttcctccacatcgatgccatcgatgccgtccagcacttccgatgaccactgggtttccagttcgatggcgtgctcgaacgcctggtgcacataggcggtcagctcgttggtctgcagctccgggttctcgccgatgatggcgcggatcagctcgctgatgaacttggtatgggccagttcgtcgcggttgatgaaactgatgatcttgccggtgccggtcatgcggttctgccgcaccatgttgtagaagtacgcaaatccggaatagaagttgatgccctccaggatcgaggactggatcaacgacttcaacagggtctcggcggtcttctcgcgcatgaagtcgtcatacgcgcccatgatcggcgcgttgcgcttgatgatggtcggatgggtgcgcgccagttcaaatacgcggttctggttcggcaggtcggtgatcgaggccagcacatagctgtaactctcgttgtggatcacttcctgctggccgatgatcgcggcattggcatgcgcggccgggtcggtgatgtactcggccacgttgtagatgaagcgcgtctgcggtgagtcgagcgtggccagcaggccgatgatcgagtcgtaggcgttcttttcgcgcccggacagctcgccgtactggcgcgcatcggccttcatgtcgacctcgtcggggatccaaaagttggtcgacagctccttgtaggcccgatagaacgacgggtacgggatgtcattccagttcaggatcccgctggtgcggccgttgatgatgccggtgctgcggttgggatggcgcggttcgaggatcttgatgcggtcgaggggggttgccatggtcgtctaccttcgtattacgtgcgttgcagatgtagagccgagcccatgcccggctgctcttcgcgtcggagccgagcgtgggctcggcgctacagcggtcagctggcgcaccactcgcattcgctgatgtcgatgtcgttggagcgcacgtagtacgtggtcttcaggccttcacgccaggcgctcaggtgcagctccagcagggtgctggcgcggatcgtgctgggcacgtacaggttgaagctgatcgactgatcaacatggcgctggcgacgcgcgttctggcgcacgctggcgaactggtcgaccttgtaggcccccttctcgtagtacggccaggtttccagcgacaggcccggcgccgccaccggccgccggaagtcctttttttcctcgtagtagaacgcgctgtagatcgggtcgatcgacgcggtggagccggcaatctgcgcggtgctcatgttcggcgcgaccgccagcagccagccgttgcgcaggccgtgcgtggcgacctcgcgggccaggctgtcccatgcggcgccagtgtagtcgcgatcacggaagtaacgcccgttgtgccaatcgctgccggtgaacatcggatagctgcccttttccttcgccagttgcgcgctggcctggatggtcaggaaattgatgcgctcatacaggcggtcggccagttgttcggcatccggtgaatcccactggatcgcctgctgcgccagcaggtggtgccaaccgaacgtgcccagtccgatggcgcggtacttgcggttggtgatcgtggcctgcggcaccggcagtgcgttgaggtcgatcacgttgtccagcatgcgcacctggatcgggatcaggcgctccagcacatcggtggccagcaggtcatccggcgcatggatcgcgcggccgaggttgatcgaagacaggttgcagaccacgaagtcgccggcgcggcgtgtggtgacgatctggtcgccgctgacgatctcctggatcatccgcgtcgggctcatgttctgcaggatctcggtgcacaggttgctggaatagatcatgccggcgtgcttgttcgggttacggcggttgacctcgtcgcggtagaacaggaacgggttgccggtctccagctggctgagcatgatgcgcttgaacagatcgatcgccttcaccgtgcgccggctgatgcgctcgtcggccaccagttcggcgtagcggtcgcggaagctgcccgcgccgcgcttctcgtcgtagaagtcctgcaggtaccagcccttggcctgcttcacctcgtgcgggtcgaacaggtaccagtcggcacggcgttcgactgcttccatgaacaggtccggcacgcacaccgaggtgaacacatcatgcgcgcgcaggcgctggtcgccgttgttgaggcgcaggtccatgaaggcttcgatgtcgcggtgccagatgtccaggtacaccgccaccgcgcccttgcgctggccaagctggtcgaccgacactgcggtgttgttgagctgcttgatccacggcaccacgccgccggaggaattgggcacgccccgtatcggcgcgccgctgctgcgcacatagcccagataggcacccacgccgccgccgtgcttggacacgcgggcgatgtcggtattggagtcatagatgccctgcaggctgtcgtccaccgtgtcgatgaagcagctggacagttgccccccgaccttgccggcgttggccagggtcggcgtggccaccgtcatgtacaggttggacagcgcccagtacgcctcgccgaccagctgcatgcgccgctcgcgcggcttttcttcctgcatgaggtacagcgcgatggtcagccaacgctcctgcggcagctcatagacctcgcggctgcggtcgctggccagatagcgcgtggccagcaggtacaggccgttgtaggcgaacaggcggtcgcgttccgggtcgatcatcccgccggcctgctgcagttcttccttcgagtagcagcgcaggatgtcgttgctgtagatgccgcggtcagccaggctttcctgcaggcccacgtaggagccgtacttcaggccgacatcgtagaagcggttgcggctggcacgcttgtacaggcggcgcaggtagatgcgcgcggcaaactgctcccactccggcgcgaccaggtccacgcgcgactcggcctcgcggatcagcagatcgaccaggtcatcggcactgatgctggacttgcgctcgaccattgcctgcaccacgcggcggtagtcgctcacgtccagctgcgggaactcggcgtgcaccgcatcgatgctgcgctgcaggcgctcggcgtcgaatggcaggcggcggttgccggcctccttggtgatccaggtcggcacgcgctcgccaccggcgcgcaaggcgtcgccagcgccggccagatcggccacgcggaaggtactgtcggtcatggtggtgaagctccaggctcgcacgcgcgttggcggtcgatgccatggcggccctgcacgcgataccggcgcacggggcggtcggggtgggatgccaaagcgcgggaacaccagatcgtcggcaacagcctgcgcctgcggccggtatccgggccgtgggggcgatctgggtccgcacgatggcggccgcgtcgacacggcaagccttcaggggcgggccgcgggacgtttgctgcgtgtccggcggcggcggctgaccgggagtgacgaccacaacatagtggggataatcggaaccgtcaacacaagatgcggcaatcacgacatgccgcgacgatcagtcgcaggatgccgtgttgcacctgcggcgccttgtcgacagcgcctgcgtccccagttcggtacaacatcaactttccgcggaacaccgcccatgcgcgctgcccagtacccttccttcggcaacccggccgacgtcctcgccattgccgatgccaccctccccgagcccggccccggcgaggtgcgcatccgcaccgtgctggcctcgatccacaatcacgacctgctgaccgtgcgcggcctctacggctacaagccgacactgccggcgatcggtggcagtgaagcattgggcgtggtcgatgcactcggcgaaggcgtcgacggcctgcagatcggccagcgggtggccgccgcctcggtgcatggcacctgggccgaagcgttcattgcaccggcacgcatggtgattccgatgcccgaggcgatccccgacgaaatggccgcgcagctgatcgccatgccgctgagcgcgctgatgctgctggaattcctgcacgtcgaagcaggccagtggatcgttcagaacaccgccaacggcgcggtgggcaagtcgctggcgatgctggcgcgggcgcgtggcgtgcatgtggccaacctggtgcgcaatgccgatgcggtcgcgcagttgcaggcgctgggcatcgatcatgtgttcgacacctcggtggagggttggaaggatcgcgtgcgtgaagcgaccggcgaagcacaggccgcggccgcggtggattccatcggcggcgacgccagcggtgacctggtcgacctgcttggccaccacggcaccctggtgtcgttcggggtgatgagcggcgagccgatgcgcattcccgccggtggcctgatctacaaggaggccacggtgaagggcttctggggcagcaaagtcagccaggcgatggcggtggaggacaagcgccggctggtcggcgagctgctgaatcgtgcggccagcggcgaactgaccctgccggtggagcagatcttcgcactggacgacatcgcccaggcggcgaaggcgggcgccggttctggccgcaatggcaaggtgctgctgcggccttgagggtaggacaaccggggtcagatccctttccgctggaaagggatctgaccccggggaagagtgcggaccaacggtccgcacccatcgagtcggttcgttaagaacctgtgatgtataactgaatgcgctttcgtcattggaaggcgtacttgcctgcatgcggtactgacggctcctcccccgttcggcgttgtcgcttccatgtaccgcaccaccctgaacctgcttgccggcgcgatcgcgctgggcctcaccgccggcgctgccggcgccgctgaaaccgccgatgccggcaaggacagcaccaccctgggcaccgtgctggtgaccggctccaacatcaagcgcagcgacaccgccgggccgaacccggtgcagatcgtcagccgcgaacagatcgagcagaccggtcgctccaccctcaccgacgtgctgcgcaacctgtcggccaatgccggcaacagtttcgacgagcagtacaccggcagcttcgccgccggttctgcatcgatcggcctgcgcggcctgtcgccgaagaacacgctggtgctggtcaacggctatcgcgtgtccaacttcggcttcgcgctcaacacgcaggacaccttcgtcgacctcaacgcgctgccgatcagcgcggtggaacgcatcgaagtgctgaaggatggcgcctcggcggtgtacggttccgatgccatcgccggcgtcatcaacatcatcctgcgaaagaacttccagggcgtggaagtcggcggcggcttcggtaccgccacccagggcggcctggacgaacgcaaggccaacctgctggccggcttcggtgacctcgaacagcagggctggaacgtgctgttcgggctggacctgctcaagcgcgatcggctcgatgcagaccagcgcgcctttacccgcagcggcgatttccgcgacaggcccggcggccgcctggccggctggtccactgccggtggcaactggctgtccaacccgcgcgcgccgcaaccgttcgccagttgccccgagggcagccagctgcgcccctacagcgatttcggcagcaccctgcccggccaggcctgcgccttcaacgcgcagccgttcaagaccctgcagcccggcgccgagcgcctgcaggcgtcgttgagcgcgacctaccgcttcaacgacagcgtcgaagccttcgccgatgtgctgtacagccacaacaaggccgaccagatcttcagcgcgccgctcaccgtgggccctggcctgcgtgcctacaacccggccaccggcacgcttgtcgacgtgccggcggtgctgccggtgggccacccgaacaacccgggcagcacgccgctgccgttcgagtacaccttcttcgacctcggcccgcgcctgaaggacaacacccaggtgttctaccgtgccctggccggcgtgcgtggcagtggcgagcgctgggactgggaagcggcggcgctgacctcgcagagcgcgcagcgcgagtacgtcgacaatttcgtcaaccgctacgcgttcgagcagatcctgcgcgatggcagctacaacttcctcaatccgtccgccacgccgggcgcgttggatgcactgcgcctgcagaccaagcggccaggctggtacaagctgcacgcgttgaacgtcaaggcctcgacctcgctgtgggacctcccggccggtgcggtcggcttcgcctggggtgccgagttccgcaaggagtcactggatgcgcgcaccagcgcacaggtgctgtcgggcaccgaactgcgcccggccatcaacgtggtcaacggcgagcgccaggtcagcgccgcctacgccgaattgagcgtgccgctgcaccgcacgcttgagctgcaggtggctggtcgcggcgaccactacgatgatttcggcaaggcgttctcgccgaagctggcgctgcgctggcagccgttggacagcctgctgctgcgcggttcgttctcgcgcggcttccgcgccccctcgctgccggaaatcgcgccaggccagaccgtcagctacggctcggtgatcgatccgctggatccgctgcagcccggtggcagccgtggcgtgaccaacatccgcaccggcaacccggacctgaaggccgaacgctcgcgcaacttcaacgtgggcgcggtgtggtcaccggatggcgataccagcatcggcctggactggtaccgcatcgagcaggacaacctggtcaagccggacagcgcgcagttcatcgtcgacaacccgacgctgttccccggccgtgtacagcgtgatgcgcaggggcgcatccagttcatcaccaaccagtacgccaaccagggcgaactgaccacctccgggctggacctggacgccaaccgcaccttccgcaccgagggctggggcaccttcaccgtggccggcagctggacccacctgctgagcttcaagcagccgctggtggccggccaggcgccctatgacggggccggcaacaaccgccacggcgccctgccgcgcacccgcggcaccacgtcgctgaactgggcggtgggcgactggagcagcacgttgagcctgcagtacgtgagcggctacgaccagcgcgtggcgacggccaccagcaatccgggcctgcgcgaccgcgtcaagccgtatcagcagctggatctgtacgtggcctacgaaggcattcccaacaccacgctgtcgctgtcggtgctgaacctgaccgacaaggacccgccgttcgacccggccggcggctccaacggtttcgacatcagccagtacaacctgcgcgggcagttcgtttcgctgggcgcgcgctaccggttctgatgcgccacctgtagagccgagcccgtgctcggctgctcttcggcaacaggaagccgagcatgggctcggctctgctggggtgtgcggaccaacggtccgcacccaccgcatcaccggctcaggtgcaggaactgcaggtgccgttcgtactggctgatgatgtcgttgatgatctgcttgcggctgtagccgaccaggtcgtagtcctggctgccttcgaacagatgcacttccgcgcggtagtagcgctggttgcgcagctgctgcgcggcgaacgacggggtcaggtagccactcaggatcacccggtacaggaaatcctgctgctcgccatggttcaccgtcagctccatgtcgccggcctcgaagcgcgtggccacgtcccagccctgcccgcgcagctgttcggccaccgcttccatcgccggcttcaccgtgtcatccatgaagcggtagacctggtcgcgcaccgggaagtgcatggcctggctcaggcgctggcgccagccctgatggtggcgatcgtcaccgatcagcggcgagggccggtactgcagcgcgcgcttgcggtgcgattcgtcactgaaggcgcgggtcaggccccacatcatcagcagcagcaccgccgagaacggcagcgaggccaataccaccgccgatttcagtgcatcgatgctgccggccagcagcagcccggcggtcagcaccgcgatcaccgtgccccagaacacgcgcagccagcgcggaccatcatcctccggcgcgccgccgtgcgaggacagcgtggacaacaccaccgcccccgaatcagccgacgtcacgaagaagatgaagctgaccagcacggtcaccgcgatcaccgtgcggctccacgggtagccatccaacagtgcatacagcacggtcggtgggtcatccaccgccagctgcgccagctgctgctggccgtggtgcagcacctggtccagcgcgctgttgccgaagatcgacagccaggccagggtgaagcccagcgggatcagcagcacgccgaacacgaattcgcggatggtgcggccacgcgagatgcgcgcgatgaacaggccgacgaacggcgcccagccgatccaccaggcccagtagaacaccgtccaaccgcccagccattccggccggccgccataggcgtacacatcgaaactcttgccgaccacgctgcccaggtagtcgcccaggttctgcatcagcgtactcagcaggtactgggtggggccggcgcacagcatgaacagcaccagcgcgatcgccagcagcatgttgatgttggccatccagcgcacgcccttctccacgcctgaaaccgcgacggccaccgccgcgcccatcatgctgaccaccaggatgatctgcaccaggttggagtgcgggatgttgaacaggtgcgacaggcccgcgttgaggtgcagcacgccgaagcccatgtcggcgccgatgccgaatacggtggcgacaatgcccagcgcgtccacggtgtagccgatcggcccgttgatgcgcttgccgatcagcggatacagcgccgagcgcagcgccagcggcaggttgtggcgataggcgaagtaggccatcgccatcgctgcgagtgcgaacacgccccagccatgcaggccccagtgcaggaagagcagctgcatggcctggcgcgccccggcctcgcctgcggccggatcgccctgcggcggctgcaggtagtgggtcagcggttcggagacgcagaagaagaacagggtgatgctgatgccggcggcgaacagcatgccggcccaggaaagatagctgaactccggctcatcatggtcggcgccgagcttgatgccgccatacttggacagcgccacaccgaccacgaacaccaggtacagggtcatcgccagcaggtagtaccagccgacattgagtgcggcccagtcctgcgccttgaccagcaggcggcccgcaccgagcggaaacaggctgacgaacagcgcgaacgccacgacaacgatcgccgcgaaggcgaacacaggccgaagggtgcgcaccggggattgttgcggctccagtacatccatggggcggcgttctccggtagatcaaagggttagccgaccgattctggctgaaccgcagtggacagagcatgaagttgcggcctgtggtcacaggcccggcccaccattccgtgttatcacgcgcgcgccggagcgcaaccttgcccgcgcgggccgcggcgcggccacgcgcatcctgtccgatcacgacattacatgcaccgcacacagcttgttgccatccgggtcacgcagatacgccagaaacacctgccgaccggacatgttgcggacgccgggcggatcttcgattgcggtaccaccgtgagccacgccagcttcctgccaggcacgcacggcctctgcactgcccagactgaaactgatggtgccgccgttggcatggcacgctggctgcccatcgatcggcgcggtcacgccgaacatccgcccatccttgaagtacagcagccgacccttttcgtcgaacacacccggacgtgcccccatcgcggcgaacagggcatcgtagaagcgatgcgcgacgtccatgtcgttcgttccaacggtgatgtggctgaacatgcgggcactccttgtggaaagccgcagtgtcggcgagcgcgggcgacttcgcaaatcgcccgcaccggtgccgccacgcccgcgaaaagacccgttgctacttggcggtgctgagcagcagcaccgccgcagtgaccagaccgatgccgatccaaccgatcggacgcaggcggttgccgaacaacaggcgtccgcaggtggcagttccgatcacgccgatcgcaccccacatcgcataggcggtggccaggtccatgtaacgcaccgcctggcccagcagggcgaaggcgatccagaccatgacgatcgcggcgacaccccagcgccagcggcggaagccttccgacttggccaccatcatgttcgcggcgacatcgatcagcgccgaacagatcacgaaaaacagagccagggtattcatcagtgtgcctccccgagggtgacgcagacgatgcccaccaccgccagcaccaggccggccagctgctgcagtgataggctctcgccgaacacggtgaggccgaccacggtcagcagggtcaggcccaggccttcccacaccgcgtaggccacgcccaccgcgatgcgacgcaccgactgcgccaggaagaagtaggacagcgccagcgcaccggccatgatcagataaccggtccagccgccatcgcgggcggcgtgggccatgaacgaggtgccgaccacttcggcgacgatcgccacggtcaggcaggcccaggcgaccagcgcgccacgggcgggaacagtacgggacatgtgaaactccttgcaggacggggaccgcgccgcctcatcaatggatccacgccgcgcgtggagggtccggaacgcccctcgcagacaggggcgacgggggttagtatcatcgccttttacggtggtatcaaaatggattccatcgacaggagcgatggatcaatgccctattcccctgaatccctacaggccttcgtggaagccgccgcgctgggctcgttctcggccgcggcacgccggctgggcaagacccagtcgacggtcagcaccgccattgcccacctggaagccgacctcggcgtgagcctgttcgaccgcagcgggcgctacccgcggctgaccgaggccgggcgccaggtgctgggccacgcacaggagatcctggccgccgatgcgcgcctgcagcagttgagcgtgcgcctgtccgcgccggtcgagccgcgcctgaccgtggtgttttccgatgtctaccagctggatccggagcagcggatcctgcagcgcttcgccgaagcgttcccggagatcgagctggagtggctggatgccgaaggcgaggacgtgctggaacgggtgagcggcggccgcgccgcgctgggcctgctgcccaggcaggagcgctatcccgatgggctggtggcgcggccgctggcgcaccacagcgagttgtcggtgtacgtggcgcgcggacacccgctggccagcgccgggcgccgcgccgccgcacaactggcacggcatcggcaggtgcgcctgagcgcggaagtcgatcagacccgcttggtcaccggcctcgcgtggaccgccaccgattacctgatggtgatggagatggccgaggacggcatcggctgggccgaactgccgcgggcgctggtgcagcgctatgaccgtgggcggctggtggaactggtgctgccgggctggccgcggcgcatccacagcgacctgctgtggcgacgcgacacgccgccaggcccagccgcactctggtgggccgacgcgttggggtgaaaaaggggacggaggggattaagtcgtttgtgccccggcggtactggggcacaaacgacttaatcccctccgtcccctttttatctgtcagcgatgggcgagcgcgtaatccagtgccgcgcacaccgctgccacctgtgcgtcgttgcactgctgcggggttgcccgcgggctgtccgggtagacctcggtggtggtggtgtacttcgcgccggtaatgccggcgcacaggcccagctttaccagcggatactcgatcacgccgtgggcgatcaccggcgaaccgatgatctcgcctttgtcgtcggcgggggcgatatgggtgaccttctccacggcggcaatgaccgcctgctggaaggccggctgcggggcctcgctgtcatccaccaggtagaagccatccggaatcaggcccggctcgaacggcttgccatcacgcgcggccagcgccgggcggaactcgctttcatcactgtcggtggtctcgtgcaggtcgatgtgcagcacgaactggcccttgatcggtgcaaccagctcgatcagcgcggtcgactcgcgggccgggccatcggcgcggaagttgcggttcgggtcgatcgcatcgaagttccagcggttgatgcgctcgaagccccacggattcacgcacggcgccaccagcaggttggccttgccggcatagtcggcggcgtgcttttcgaggaactccagcgcgcccatcacgccactggtctcatagccgtgcacgccaccggtaaccagcgcggcgggcagcgccgggttccagtcgcggctgcgcagggcgaacaacgtataggtctcgccagcgtagtcgagccggccataggccaccttgtcgaaacgcgaggccagcgcctcgatgcgcggcagcacctcctggtcatagcgacgcaggcgctgctggcgaccacgccacagctcccgttccgccgctccccacggctggccaggggttccgacggggtagaaggcggcttgggacatggcggatctcggcgagtcaggaagcaatcgcccattttaccaccggggcaacggcatgaacccgacgcgcattccattggcgaatggaatcagcaataattctcatttacgaccttccacagcctgcaccgatgcccatccacgccctgcaaccggcccgcctgcccctggccgccgccctcaccctgtgcctgcttccggccgccagcgtcttcgcccaggacggcgctaccacgctcgacagcatccaggtctctggcagctggctgggtaccggcctgcatgacagcgtgaagcgcttcgccggcgcgcgcacggtggtcgaccgccagcgcatcgaggccagcggcgcggccagcatcggcgatgccatgcgccgcatccccggcgtgcaggtcaccgacaactccggtacggccggcagctcggtctcgctgaacatcggcgtgcgcggcctgaccgggcgctactcgccgcgctcgaccgtactgctggacggcgtaccgctggcggtggcgccgtatggtcagccgcagctgtcgttcgcgccgaccagcctgtccaacatcgaatcgatcgacgtggtgcgcggcggcggcgcggtgcgctacggcccgcagaacgtgggcggcatcatcaacttcagcacccgcgccattcccaccgaggcaggcctgcacggcgaagcgggcgtgcgctacaccgcctacgaccatggcggcggtgacagcacccagtacaacgccttcctcggcggtaccggcgacaacggcctgggcgcggccctgctgtactccggccaggacgggcgtggctggcgccagggcagcgatgaccgcttcaacgacctggcgctgaagttcgcctatgccatcgacgcgcagcaggaactgcgtgccaagctgtcgtactacgatgtgcgctcgctgaccccgggcggcctgacccgcgcccagtacgaggccgacccgttccagaacacccgctccaccgatttctggaagggccaccgcaccggcatcgacctgggctacaccaacacgctgtcggccaacagcgaattcgaggtgctggcctattacaacgaaagcagccgcgccagctcgctgatcaacgcggccaatacccagttgaccgtgcagccgcgcgattaccgcgtgcttggcatcgagccgcgctatacccagcgcctgcattggggcagcacggtgcacgacatcaccgccggctaccgcttcctgcgcgaacggggcaacgaccgcagctacaccgtcagccgccgcaccggcgtggccagtgccaccacccgtttcgacaacgcgaccgatgcccatgcgttctacatcgacgaccgcatcgcgatcggccaatggcggatcaccccgggcgtgcgcatggaatggatcgacatggaccgccgccaggccggtggcacggcgaccttcagcagccgcaacgacaaggccctgccctcgctcaacatcgcctacctgctgacgccgcggctgactgtgttcggcaactacaccacctcgttcgggccggtgcagaacatccagctcaattcgcagacggccagcaacccgctgaacccggaaatcgccaagaccaccgaactgggcgcgcgctggcaggacggtgcactgcgcgcggaagtgaccgtgttcaagatgcgcttcgacaaccagatcctgcaggtgccggggatcaccccaccgaccttccagaacatcggcgccaccgaccacaagggcgtggagagcgcgctggagtaccacttcgccgaggacagtgcgctggccgggctggagctgtacgccaactacacctggacccaggcgatccagcagtccggtgacaaccgcggcctggacgtgcccttctactcgcgcgacaccgacagcgtcggcgcccgctacgcactggccggctggaccttcaatgtctccagcacccaccagagcggccagttctccgatgccgccaacacctgggaagaaaccgctgacgcgcgcgtgggccgcgtgccgggcgtgcgcctgtggaacgcgcaggtggcctggcaggtgccggggctggacgacagcgagatcgcgctgggcgtgaacaacctgaccgacaagcgctggtacacgcgcaacgtcgatggcaacgccggccgcatggtggccgcgcctcgcaccttctacgtgcagggccgctaccgcttctgacgcggtaaccgcccgatgcagtgacggcggcgaccacggtggcggcgtatcatgccgccaccatgtcactgcctgtttcgccatcgcgcctgcatctggccttccagggcctgcgcctgcgcctgcgcggcagcgacctgtggttcatcgcgcttgccctgctggtcggcctgatcgccggctacctgaccctgctgcagtccggcatcgcacgctggctgcagggcaccctgtacgggctcgacgacggcatgcgcctgagctccctgcccgcgctgacctggaccgcactgctggtgctgccgctgggtggcctgctggtcggcctggtcagcctggccgcgacccggctcaagcggcccctgctcgatgcggtcgaagccaatgccctgcatggcgggcgcatgtcgatgcgcgacaacctcatcgtgctgacccagaccctgctgtccaatggctgcggcgcctcggtcgggctggaggcttcgtatacgcagatgggagcgggcagcggctcgcagctgggccgggtgatgcgcctgcgccgcaacgacgtgcgcatcctggtcggcgccggtgccgccggtgccatcgcggccgccttcggggcgccactggccggcgcgttctacgccttcgagatcgtcatcggcgcctacaccccggccgcactggcgccggtggcggtggccgcgctggcaggtgcattcgtggccgaccaggccggcatcgagccctacctgctgccggctgcgtcgacgattgatgtccgcgccgccgactacgccatttacggcctgcttggctgctgctgcgcgatggtcggcatcgcggtgatgcggctgatcgcctcgatcgaaggcacggtcaagcgcagcccgctgcctgcctggggtcggccggtggtgggcggcctgctgctgattccgctggccctggccagcccgcaggtgctgtcgtccggccatggcgcgctgcacctggacctgaccacgcacctgccgctgatctggatcggcggcctgctgaccctgaagtgcctggcctcgggcatctcgctcgggtttggtttccgcggcggcctgttcttcgcctcgttgttcatgggcaccctggtcggcgccctgttcgccggcctgctggcgatggccactggtgtgccggtgatcgatgccacgtccgccgcgctggctggcatggcagcgttggccgccgccgtggtcggcgcaccgatgaccatggccatgctggtgctggaaggcacccacgacttcctgctgaccagcgtggtgatgagtgcggtgctggtctccagcacgctggtacggcagtggttcggttattcgttctcgacctggcgcatgcacctgcgcggcgagaccatcaagagcgcacgcgacgtgggctgggtgcagaacctcaacgccggccggctgatgcgcaagggcgtggctaccgcgccggccgatctcgatgccgccacgttccgccagcgcttcccgctgggttcgggcagccgggtgatcctgatcgacagcgaaggccattacgcaggcatcgtgcagattccgcgcgtctacggcgacggcgtgaagccggagaccatgatcggcgagctggccgagaaccgggacgtgtcactgtcaccggccgcggacgtggtcagcgtgatgcagcgcttcgaccagacccaggccgacgaactggccgtggtcggcgccgacggccaggtcctgggcgtggtctctgaagccttcgtccgcaagcgctacgccgaggaactggacaagcgccagcgcgaactgatgggcgagcgcgtcgacgacaccgactgaccccgcaaaaaggggacggaggggattaagtcgtttctgacacgctgaccaaccacgcgtggcgtggaccgctggacatccacgcatggcgtggatctactgtcacctcgaccggctagactccagccatgcgcttcattgagaccttccaggccggtcccttcgccgacaccgtggtcagcctgctggccgccttcgtgctgggcacgctgatcggcgccgagcgccagtaccggcaacgcaccgccggcctgcgcaccaacgtgctggtggcagtgggcgccgccgccttcgtcgacctgggcatgcgcatcgccggcagcgccgaggcggtacgggtgatctcctacgtggtctccggtgtcggcttcctcggcgccggcgtgatcatgaaggaaggcatgaacgtgcgcggcctgaacaccgccgccaccctgtggtgctcggcggcggtcggcagctgcaccggcgcggacatgctggccgagggcgtgctgctgaccgtgctgatcatcgccggcaacacgctgctgcggccgctggtgaatgcgatcaaccgcatcccgatcaacgaggcggcgaccgaagccacctacgaagtgcgcctgagcgtggatgccgaagccgtaccgcgggtgcgcgagcgactggtcgatgcgctggaggccgcgcagtatccagtgggcgatgtgcaggtggtcgagcatgccgacgcgcctaccgacgtgatcgcggtgctggtcagtaccgcggtcagtgccgacgagctggatctggtgctggcacggatggagcacgtgccgggggtgctgcatgccacgtgggaagtcagcacccgcgattgattcatccacgcagggcgtggatctgccgaggtcgtgctgcagtggattcacgccatgcgtggatacgcttctctcacccacccgccatgcgctgctgtgcccgcagcagcttccggaacgagccgcacttccgggcatcctctgcctgcgggcaggccgccgcacgttgcaggtgccggcgtacccgttgcagctggatgatctgctgctgcagcacatcagcctgcgccagcagggcctcacgatccagcgtaaggcatccgctctgcggcggcagcgatgcgccgatctgctgcagcgacagcccggccgcctggcccaggccgatcagtgccagccgctccaccacctgctcgtcgtactgcctgcgcaggccgcgacggcccactgcctgcagcagcccaagctgttcgtagtaacgcagggtcgaggccggcacgccactgcgcttgaccacttcgccgatatccagttcacgcacgggcttgacctcaagtgaccttcaagcgccaacctatgggcgacttccctgcaaggcaagaccatgacccgtacaccccccgttgatcagagcgccctgtggaacggtcctggcggccaggtctgggttgcgcagcaggccattctcgatggcctgttccagcccatggccaacctgctggtggccgaacttccggagaccgtcacgcaactgctggatgtaggctgcggtaccggtgccagcctgctggcatcagccgccgcacgcccggcgacacacagcaccggcctggacatctccgcgccgatgctggcgctggcccgccagcgcgccgaggctgcgggactggacgcggacttcatcgtggcagacgcgcagcgccatcctctgccgtccgcgcacttcgactggatccagtcgcggctgggcgtgatgttcttcgaggacagccaggccgcgttcgccaacctgcatcgtgccgcgacacccggcgctgggctgcgcttcatcgcttggcgcagtgccgacgagaatccattcatgaccacggccgagcgcgccatcggcgatgcactggatctgccgccccgggtacccggcgcgccgggacagttcgcctttgccgacggcgggcaggtacagcggcttgtgcgggccgctggttggaaggatgtggaggtggttgcggtggacctgccctgctcgatcgcccgcgaagacctgcctacctatgtcggccagctgggcccgttggggctggccctgcgctcaatgccggaagcccgtgccgccgtgcttcgccaccaggcgctggctgcattcgcgccgttcatcgaaggcgaccgcgtacgcgtagatgccgcctgctggctggtccgcgcccgcgcgtaggaaaaggggacggaggggattaagtcgttcttgccccgcgtgtgcaggaaacgacttaatcccctccgtcccctttttctttacagcgcctcgccggcgtcggccaggcgcgattcgatcaaggcgtaccactgctgcagcacgtcgatcagcatgtccagctcggcgtcggtgcgctgtgcgcggccgctgcgcaggcaggcctgtgcttcctgcagttgggccaggaaccctgccacggtatcggcctgcaggatcaggccgggcaggcgccggcccgggatgcgcaccacggcatggttgccgagctggccgtacacgctgagcgtagcttccgtcttcatggagagtggcaggaattgggcattcatcgcgtgcaccgtttgaagacctgagccgcaggcaggcgtggacgacgggggagacgttgccacgcctgccggcggtcaggggggactcgggatgccggggcaccgccccggcgcaggagggtcaacggggctgtgccatcccggcgatctgcacgcgccggttcggcgccaggcaggcaatcagctcgcgccggttgcgctgcccgcactgcacgatcggctcagccgcgccgcgtccttcggcgctgatgctggccgcaggcacgccgccctgcaccagcgcgctgcgcacggcctcggcgcggcgctgcgacagcgcctggttgtagctggcgctgccgatacggtcggtatagccggtcaccctgatcgactgcacctgtgcggcttcgcgtacctgcgccaggatgccctgcaccgcctgctgcccttccgcgctcagcaccgcgctgtcgaagccgaacaacgcgtcggccgacagccgcagcggctgttccggcagtggtgccggtgccggtgccggcgggaccggtggccgcggcggctccagcacggccgcgcacgattccggcttccagtaacccgcctgggcgatgcccttgctgtcaaagcggacctggaactggcaggtgaaatactccgcaccttgcgcggtgcggaagttgaacaggtagttccactcgcgcacgccccacatgccttcattgaaatgcggcgtgcccagcagcgtgtacaactgccgcttgctcatgcccggcgcgaagcggcgcaggtcggcgacgtccggatagatgccttccttcaacgaggccttggaggcctccgggaactgcacggcggtggcttcgacgggaccgtcggtggccggcgcatggctgcggcaggcggccagcaggcccatccccaggatcaggcccagcgtagcggcatgttggccggcgcgggcgatgcgatgctgtttcatgtcattccccctgtagacgtttccgcgatgccgggccgcgggcgcggcccggcggcggggatcaccactggatgccggcaccgacggccacgccggcctcgccacggctgttggtcgaaccgctgaacttgtagatccagcgcccgccttcggagacaccggagatgcccagcgccacgcccgattcgccgttgtagctgccagccgcgatcgaggccatgctgcggcccgcctcgctgggctgcggcagcgctgcggtggccatcgccgaggcgataccggccgaagcacggttgtcggtcttgcgcaggtcgcgctcgaagccacccatacgctcgtcggtgtaggccttggaccagtccagggtctgcgccatgcccgacttcagctgatccacgttgaccgcgtcggtaccggcggtgccagcggcaacgttgcgcaccgtggtcgggccgctgctggtgctgcccagggtgacgctgttgtagttggtcgcaccgttcaccgtggtgtcgtagcggatggtgccctgctgcgacgcctgcagctggcgcacgttgaccgcgtcggtggcctgcgagccgtcggccacgttgaccacctggcgttcggcgccgctggcacccaccgagaccgtgttggcccggttcgccaccgaacctgcacccaatgccaccgagttgtcggcctgcgcctgtgaaccattgccgagcgcggtcgagttggcaccggcggcagtggagcctgcaccaccggcggcggagttggcgccgctggcggacggatcggccaggttgttggtgttgttggcgcggaagctgcccgccacgttggtgatgttctggatcttctggtcggtgtacttcttcgactcgtcgatggcgtaattcacgccgttcttcagctggccgacattggttgcgtcgtaggtgtccgagccgtcggcaacgtgggtgatcttgcgctcgctgccgctgctgccgaccgagacctcaccggccgagttgctggcaccggtctggccgtaggcgccggtatagccgctctgtgcgccaacgctggccaccgaaccggcacccagcgccacgctgttgccggcactgctgctggcaccgttgccgaccgccacgctgttggcaccggctgctctggcctgcgggccgaccgccaccgcttccgcaccggccgcggtggctgcggccgccgtcgagttcaccgccaggtaggcactgccaccgccaccgttggtgatgcgctggttgaggaccttcagcgagccatcgacggcagtgaaggcggcggtgacgttgttgtaatcgccgctggtgaaggtgccatcggtggcgatgctggaaatgctgaacgtcggcgcggtccacgcgttggtggtgccgttgtaggcagtggtgccgccgaagtagttggcgatggtgctgtgggtgctgaacagctggtcgccggtgatggcgtcgctgctgccggccaggatgctgccggcggcgacgttggtgatcttcaccgcaccggtaccggtgcccgtcagcgtcacgctgttgagcacgttgccactgccgtcgacatcgtatttcacggccagcttgtcgatctcgccggtctggtcggcaacgttggccagcgagttgctgaccgcatcgaaggcggtgccgacgtcgttgtagctgcccttggtcacggtgccgttggcggcgacgttgttgatcgagtacgtcggtgcggtcagcacgccgctggcgctgaccgcagcaccaccgccgaggtgggtggccacagcctggttggcggcgaacagctgggccccgttgatggcctcgctgctggtggcgctgacctggcccgggccgagattgcgcagcgtggtggcggtgccggcctggcccagcgtggcgctggcatagttgacgctgccatcggcgttgaggtcatagcgcagtgccccctgctccgaggcctgcagctgtcccacgttgaccgcatcggtggccgcggtaccggccgccacgttgatgacctgacgctctgcgccagcggcaccgatggaaaccgtgttggcacgatcggcaaggcttcccgcacccactgcgatgctgttggctgccgtcgcccgcgcattggtgccgaccgcgatcgaatcggcgccgctggccacggcctcggtaccggtcgagttcacccgcaggtacttggtaccgccgttgcggatatcggtgatctgcgtgttgaggttgaccagcgaaccatccaccgccgcgaaggcatcggtggcgttggtgtacaggccctgggcgatggcgccggtggtggagatcgtgctgatctcgaacagcggtgcggtgaagatgccgctggccgggtcaaaggctgcacgaccaccgaagaagctggcgatcgcgctgttcgttgccgccagctggccaccgttgacggcctcgaggctgcccgcggtgaccgcaccggcggcgagattgccgatggtggtggtgccggtgcctgcgccgagggtgacccgtcgatagttcggattgccgccggcgtccagatcgtaggtcaccgcagcatccgccacgccgttgatcaggctgatcgcgcccttcaactgcgccacgttgaccgcgtcggtgttgccgctgcccgcagccacgttggtgatctggcgctcgcccccaccggcggtgcccaccgatacttcaccggccgagacctgcggcgccgtgaggccgtaggcactgtagctggcctgcgcgccacgcagtgcggccgagcggtagcccagcgcgaccgagttggcctggttggaggtggactcggcacccagcagggtctgcccgttggcggtgccgacggcactgtcgccgacgatcaccgaatggcccatgcgcgcggcatagtcggccgtcggcacgccggtcgggttgctgggatcgttcacgccatcaccggggaaggcgacattggcatcgaccttcggcagttcatggcgtgcgttggcgccgatcaccacttccttcgagccgttggcgaaggcgccatcgcccatcagcacctggtagtcctgcgcggcgttgacggcccagcaggagatgtcggccagcgcgatgtccaggcacttggccgcccaggccggggaatccttcggcagcagcaggcccagcaggccacccggattgccgttgttgatgttgtagatgtagctgtcggaagtgacgccaccgatcagggtcaggtgcgagctgccgcccgtggccgcgccgcccagaccgttgagcgtgctgccgaccggcgacaggttcaccaccggcaggcccagcacattgaccgtcgaataggtctgcatcacgttggcattgctgagcttgagattgccattgctcaggtagccattgccgccgaacaggctggtggtggtcggcccgatcagctggccgacattgccgaccaggccaccggtgccgatgatcaggccggcattcgggtcggccggcgccggtgccttcgggctggtcggcgggatcgccgacggctgggtcaggccgagactgccgagcgtgccacccaccaggccgcccacggcgctgcccaggttgccgacagtgccattgagattgccgttgagcaggttgcccaccgcgctgccgacgttgcccagcgtgcttcccagcacaccgcccaggcctgcgcccgggctaccggtggtgccgttgagaatgccgcccactgcaccaccgaccgtgccgacggtattgctaagcgtgccgcccaccgcgctgccaacctggccgacggtgccgctcagagcgccacccaccgcactgccgacggtaccgttcaatgcgccaccgactgcgcccaccgtgttgttgagcgtgccgcccactgcaccgccgacctggccgacggtgccgttcagagcgccacccaccgcactgccgacggtaccgacagtgccgttcagagcgccacccacggcgccgccgacttggccaaccgcgccattgagcgcaccacccactgcactgccgacggtaccgacagtgccgttcagtgcgctgcccacagcaccaccgaccgcaccgaccgagttgttgagcgcgccgcccactgcactgccaacagtgccgacagtaccgttcagagcaccgccaactgcaccaccgactgcgccgaccgtgttgttgagcgtgccacccactgcgccgccgacctggccaacggtgccgttcagagctccgcccaccgcaccgccgacggtaccgacggtgccgttcagtgcaccgccgactgcgccgccaactgtgccgaccgtgccgttcagagcaccgccaactgcaccaccgactgcgccgaccgtgttgttgagcgtaccgcccactgcgctgccgacctggccaacggtgccgttcagagctccgcccacagcaccaccgaccgcactgaccgtgttgttgagcgcgccgctcacggcgccgccaactgtgcctgccgtgccgttcagtgcaccgccaactgcaccaccgaccacgccgactgtgttgttgagcgtgccgcccactgcaccgccgaccgcgccgactgtgccgttgagtgcaccgcccactgcgccaccgaccgtgcctaccgtgccgttcagtgcaccgccaaccgcaccaccgactgcgcccaccgcgttgttgagcgtgccacccactgcaccgccgaccgcgccgactgtgccgttgagtgcaccgcccactgcgccaccgactgttccgacagtaccgttcagagcgccgcccactgcgccgccaaccgtgccaacggtgccgttcagcgcaccacccaccgtgctaccgaccgcacccgcggcaccgtgaagcgtcccgccgacagcatccactgctccgcccaccagaccgccgacgcccagcgcgctgtgctgcgcggctacggttgcctgcccggccagcttcaggttgcgatcggcgactacttcctggccgtccggcgcctgcacgcgcaccttgcccgcggcgccggcatcgaacgcggcactgatggcgcgatcatgcgtgtcacccggcagttcctccttggccggcagcgtgaccgccgccgtcgcccgggcctggccctgcccctcgatgtgatggccagccaccgccagatgcgcgtcggtgtcgccgtcgacagaggccttcagggacgaaccgctgaggcccgctgccgcccgggcacccgaatcgatcgaagcgacctgatggccagcgatgccgaccttggccctggcgcgcgcatcggcagcgacgcccagcggcgcctgcgcgcccggcgcaacgtgcgctgccagcgatgcatccacctgtgccgccttgatcgcagtgttgcccaggccgacagtggcgcgtacatcggccgccagcgccggcacggccacctgcttcggcgtggtgttcgctgccagcttcacctgtacggcggccggcaatacgtcacgcaccaccggcagcgatgtggtgttcaactgcaggcccaggcgagcgtccgcactgatcgcggggctgctctgcgcctgtcgcgcggcggcagccaaggccacttccgcgtcgaccttgaccggcatcggctgcgcatacttcgccgcaagcgcttgcaggtcgcgcagcgactgattggtttccgatgcccctgcgtggccgctggccagcgcgcacagcagtgccagggccagcgcggtgggcatcagcaggaaggcgcgcggatcgcgtgcggcgccgccgccgctgtcgccggtggccagttccgaggccacaaccagagcattgagctggcggttccatacacgccggtagatgcggttcatgagcatttcccccgtaggcgaacaactggaatgtcagtggacttgccgttaggcaggtgactgacatttcagcggttgcaacggtggcggcgcacttcaatccggcacggcaatcgcgcattccggcaaatccacggccggaatcggcagccgtttatgcagaagcggcaacatgatcggcaagcggatgtgcaattccggcacgaatgccgcgaaaacccttgcggggcttggctcaggccggctggccgatctgcgcgggcgcgcgcatcagggtatcgcgcggcagttcgccgaataccttgcggtaattgtcggcgaagcgcgaaagatcccacaggccgcagctgagggcgatggctttcaccgagcgacggctggaatcggccatcgacaggctgcggcaggccgcgcacaggcgcagcatggagagataccggttgggcgaggttccaaacaggtcctcgaacgcataacgcaggccgcgctcgctgaccccagccgcatcgcagatttcattcatgtagatattgcggcgcaggttgagccgcatgaagttctctgcccgctgtgcgatcagataatgcgtacgccgtgcacggctgcaacccgggcgatccgccgcaccggcacccagaagggcctgcacatcctcgtgcagcagggtttcagtttcttccggctgcaggcctgcaccctgccccagctgcaggtgcagctgctggtagtggcgtgccaacggcgtgccttcgctggccagattgaacagtgacagtgcctggccagcgggaggcgtgctgcgcaggctcagttcggtcagcttgcgctgcacccgtgccaccggcagcagcatcagggtcatgtgcgtgcctgggctcagggtgaactcactgatgccttccggcatgatcgtcaacgccatccccggcgtgagcggtacgccatggcaccagctcagcgtctcatcggtggcgtgcaggtacccgagcatcgcccagtccggcggcagcatgaaacggccgcggcagtggaaaccgcagctgatgctgcagaacagggcttcctcgtgcacgcgcgaagcgaatgccgcacgtggcccattgccatcgagcagcagcagttcgacatcacagacacgaagcacgccgctcagcgtggccaggtctatcgaccgcaggccgctgtcgccgctgtctcctaccccaccatcgaccatgacagtgttgtcccccgttgatccgccatgcgatgcggcccccactgcctgacagggcgcgcagcgatccagaaaccacttccgttgtcgtgcaggccgcatcggctccgatgcggccaaccatggaaatgcaacagcttgaatgcgagtatgcccgataatcggcgaaggtaaacccgcgggctgcaatgaagaaaaaagatacacagatgaagaaaatgtcggcgccattggcacggtcttcgcatgcgccggaaaatggaaatcacataatctgcacgaccatgaatcgttttgccttcgaacggattctcgtcacagaaacggcctgaaagtttcagcatcgcggggtttctgccgaatttgcatataggttcctgttgcagccaacttccattcaggcaaagtcgatagcacggtgatccggccaactgatccggccgcacccagggggacagcatgaccacgcacgcatcattggatgcctcgaccaccggccccgggccgagcggtcgcgaccgtgcggctggcggcctgcctggagacgatcaccctgcttgagcacagcgggcccatcccgccgtgcctcctccgccaggacgcgcggaggcccacggacgatcccggcggagccgggccaccgcccaacgcaggtgtactgcatccgcagacaggtagagggagacattggtcatgaacgcatcgatccgcaaattcctgaaggaagaagacggtgtcaccgcgctcgagtacgggctgctggctgccgtcatcgctggtgtcctgatcgcggtcggcaacgaccagatcaaggggttcttcgaaacgctgttcaagaacctctccgcactggccaccaaggcgtcgggctcgacgacctgagcggcgaccgcgcgcggccggcagagccgcgacggtggggcgcatggaaccaggcgaagaccgtccagtgacggacgacggagtgtgcgatgacactgctgggattgttggccatcggcgtatgcctgcggatcgcgatcagtgatctgtatgcccgtcgggtgcccaacgcctggctgatcgccgcttacgtgatcgccaccgtggtgatcgtcttcggccagttcagtgcgccgcgccagccgtggctgccccacgttgccggcgcggcgctcggcctgttggcgctgctgccgttctatgccctgcgctggatgggcgccggcgacgtgaagttctttgccgtgctggggctgatgctgggctggcaggcgctgcttccggtctggctggtcgccagcctcgccgccgggttgcacgccgtgctggtgctggcgggccggcgcctgggcgtgttgctgcccggccacctgcagatgcaggtgaatcgcaccagcacgcaatggcacgcgcatccggccctgcgcgacatgcagaccgcacgccagggacgacgtggcattccctatgccgcctacctcgcactcgccgccatcggctgggtgctggcaagcatctacggaggtgcaccatgaacatccgcagcccgcgccggcaacgcggcgtcgccagcatcgagttcgccctgatgctgatgctcggcctgttgccgctgctgctgttcaccttctccggggtgatgatcatggcagcacagcagaccctggccaccgcctcggccgaaggcgcgcgcgcctcgctgcgctacggcacggccggcgaacggcgcaccgcagcctgcgtcgccgcacgcacctcgatgcaatggctgctgcagttctccaagcagaacgtggactgcagcgcggggggcagcaatgccatcctggtgtccgcgcaggcgccctgcgccggcctggccacggcccagtgcatgaccgtgacagtcagctacgactacgccagccatcccttcctgcccggcaccgccacgctctacaagtgggtgatgcaggctcccatccgcagcgtcgcggtcgcccagctcgatctcggcagcggcaactgatgaccggtattttggagacggttccatgctcaagttgacccgcatcgctgccgtcgccctgatcggcctggccgtgctgctggcgctgatcgccttcatgatcgggcgcaaaccggccgcaccggtcacggccgtgccgatcacgcacaacgaagtgcaggccatcacggtggtggaagccgtggcgcgcctgcccgcgggcgagccgatcagcgccaacgacctgcgcctggcccagcgcacatcccccgtcgccggtgccgccaccagcatcgccgccgtggtcggcaaggtgccggtgcaggacatcgccgaaggcagcccggtcagcagcagcgcattggcacagggcttctcgctgcagctgcggccgggcgagcgcgcactggccgtgcccgtggacgaactggtcggtgccggcaaccgcatccttcccggcgacttcgtcgacgtcttcctcaacctgcgcaatgcccagcccagcatcaacagccccgccgaagccgcgcagacgcgcctgctgctgtcgcgcctgcgcgtgctgagctatgggcagcaggacatcgcgccggtcgcctcggaagccacctccaatagcgaggccgacacccgcaacgacccgcgcgcggccgacatcaccggcagtggcggcagccacagcagcaatgaagccccgcaacccgcgcgcagcgcggtgctggcggtaccggtggccgacgccaatcgactgctgctgggtgcgcagcagggcaagctgttcctggcgctgcgcaatcccgctgatacgggcctgcccgacctcgcactgttccctcagtcgcgcggcgtgatcgatccgctgcgtgggctcgacgcagagcagcagctggcgctgcagcgcccggagaaccacgccttcgccggtatcgacggcgacgcgctggccggccgcggcagcgccccgccacgcagcaacgcggatgcacccgcgcgtgcgccggcgccccgtcgcagcgccccgcgcgcttcgggtatcgagatcatccgtggcgacagttccgccccccgtggctccctttgaccagcatcgagcgcatccatgaccgaacgtcaccgccgtccacgcctttctccccgccagcggtggctggccctgctgctggtgctgctggcaccggcaacgagcgtggccgccgatgacctggtgctgcaggcccgtgagcagcgtccctggaacctgccggccgacctggaacgggtggccattgccgaccccggcgttgccgacatcgtgatgctgcgcggccagcgccaggcgctgctggtgggcaggatgcccggcaccaccaccctgctgctgtggcaccgcaagcaggccgagccgcaacgggtgacagtacgggtgcagagcgccgtacagggcgcggccagcaccggcggcaacgatctggtgttcacccagcaggaccagcagggccttttgcagggaagcactgacagcgtgctctcgcacatgcaggaacaacgcacggcggcgatggcactgggcaaggaaggtgcgcttgccgatacgtccaccatcagcagcggcggtgtggtccaggtcgaggtcaaggtggtcgagttcaacaagaccgcgatgaagcagatcggcatcaacttccagaaccgcaacggcggcttcgcttacggcttcgcgcggcccggcaccgggttgccgggcaacaccggcctgctgcccggcatgaaggaaggcaacagcagcaacgaggccgtctcgccgatttcctcggcattccgccttgttttcggctcgaccaaggggctgtggaacgccgatgtcgaactgctgcaggccaatggcatggcccgcgtactggccgagccgacgctggtggcgctgtccgggcagagcgccagtttcctggccggtggcgaactgccgatcctggaaccgcaggggcttggcactaccaccatcacctacaagccgttcggcatcggcctgaccgtgaccccgaccgtgctggcagcgaaccgcatcgcgctgaaggtagcgcccgaagcgagcgacctggactacagcaatgccattgtgctcaacaacgtgcagattccctcgatcaccacccgccgcgccgacaccaccgtcgagctgggtgatggcgagagtttcgtcatcgggggcctggtcagctccaacatcgtctccaacgtcagcaagattccgctgctgggcgacctgccgatcatcggctcgttcttccgcaacttcgattacaagcgccaggacaaggagctggtgatcatcgtcaccccgcgcctggtgcagccactggcgcgcaacaccgaactgccgctgcccggcgagcgcgaagccaggccgcatctccccgagtggggttcctggttgctgggtccggtcagccaggacccggtgccctgattctcgcgctgactccatgatgcctgcgataccacgcccatgccctacgccaccgcccagccgctgcatccgcaaggaccgccaatgaacctggtcctgtacggcatcgaccgcgaactgctgccccggctggccgccaagctgccgccgagcaccgccctgcattggcaggacagcaacgcccccacctccgcccaggacctgcaacgcggcccgcagagcctggtgctgctcgacttccggcccgagcatgcggccgcctcgagcgtgctggcgcagcagctgcagcagacccaaccggacctgccgctggtggccgtgggcgccaccagcgccggccaggtcgaaggcgtggtgatcgcgctgcgcgccggcctgcgcgatgtactggacctggacagtgacgacgcaggcatcgaggcggccttgcggcgcgccctgtctccgcgcccggcagcggttgcccagcacgcacacaaggcacgcctgatcgtgctgctgggtgtgcgcgccggcgtcggcaccagcaccctggccgcacatctttcggtgctggcgcagcagacgcgcgccctggcccagggcgaagccgtgcagcaggacggcctgctgatggagctggcgcagccctccggcgacctcgcgctgtacctcaatctcgacagccgcttccactacgaagacgcgctgcgcaatgccagccgcatcgatgccaccctcgcccgcacggccatggcgcgccatgactccgggctggtgctgctggatcgtgccagtggcagcgatgccgttccgccctcggatcctggcgcgctgctgcagcgcctgcgcggcgtgttcgccagcgtgctgtgcgatgccggcggctgcccgttgcggcagcttccgcccttgttgctggaccaggccgacgagatctggctggtcaccgatgcctcgatcgccacgctggtttctctggaccaggccctgaagcacctggcgggccagcgtgagcgcgagaagcgcctgcaactggtgatcaaccgccacgatgacagcagcggcatgagcccggaacagatcgcacgccgcttcgaagtaccgctgctggcgacgctgcccgaacgaccgcgcgtgcgcctggccgccagccagggacacctgctgctgcaggatgccccgcgcgacccctatctgcgtgccctcgccccgctcgtgtcgcgcctggatccggccgcctgcccggtccagccgcatggcctgcgggaaagactctcccttgccctgggtggatcgcaatggaagacaaggtaaccccgttcccgcatgccgttgcccgcccggtactgcccgaatctgccccgggccacctgccgttcgcgcagaccgagcagtaccagaaggtgctgtcggccgcgcatgagcatctgctcaacagcatcgaggacgagcgcatcgacatcgattcctgggccccggacaccatcgcccgctgggtgcaggtccagaccgtgggcttcatccaggaatggcgcatcccgatcaacgaagaagagatgcaggtggtcgccgagggactggtcaaggagctgaccggtttcggcccgctggacgacctgctccacgacccctccatcgaagacatcctgatcaacggcttcaaggacgtgcacgtttcgcagggcggacagctcaagcgcgccacccagcgcttcaccgatgatacccacctgctgcgcatcctgcgccgcatcctcgccccgctcggccgccggctggatgattccaatccgatggtcgacgcgcgcctgcccaacggtggccgcctcaacgcgatcatctcgccgctggcggtggacggaccgatggtgtccatccgcaagttccgcaaggacccgttcacccccgacgaactgctcgccaagggcaccttcgacgcaccgatgcaggcactgctgaaggcgatggtgctggggcgctgcaacatcctggtctccggcggcaccagctcgggcaagacctcgctgctcaatgccctggccagctacgtgccggccgatgagcgcgtcatcaccgtggaggacaccgccgagctttcgctgaaccatccgcacgtggtgcgcctggagagccgcatcggcggcgccgagggccagggcgcggtcagcatccgcgacctggtgcgcaacagcctgcgcatgcgcccggaccgcatcgtggtcggcgaagtgcgcggcgctgaagtgctggaaatgctgcaggcgatgaacaccggccacgacggatcgatggccaccatccacgccaacacgccgcgcgactgcctgtaccgcatcgagatgctggccgggtttgccggcttccagggcagcgaagacagcctgcgccggcagatcgccagcgccattgatttcatcgtgcagatctcgcgactgggcagcgggcgccgggtgctggtctcgatcaccgagatcaccggggtcagcgacaacctgatcaccacccaggagatgttccgccacgaggtgcagatcgatggcaccggccgcgagaccgaccgctggatcggcctgggcttccatccgcattcgcacaagctggagccgttccgccagcagctgcgcgaatcactctacggggacttctgaacatgggcaccggcctgctgctgggcgtgttgagcatcatctcggtgctgctggcgctggccgtctggctgtggggtaccgccagcagccgtgaacagcgccaggcctcgctgcagcacaccgagcagcagctggcacgcggcagcacggccggtgcggtgccggccgggcctgccgttgcggcggcgaacgattcggcccgccccgccagcagtgggagccgcgcattaccctgggatggcgtcctgcagcgcgccggcctgcagccgggctggaagctgccactgatgctgctggtaccgggactggtgcttgcggtcgtggcggcggtgcggctgggcacggcctggatgtttccgctgactcttctgctgtacctgctgggctgctggctgtgggtgatgcgccggatcacgaaactgcgcgcgcagctgctgcaccagatgccggacttcctcgacaacctggtccgcctcaccgcgctgggcaacagcctgcaggccgcgttccaggtgtcttcgatgcagaccagcgcgccactgcgcggcctgctggacaccacggtgcgctatgcgcgcagcggcatggagctggatcgtgcattgagcctggccgcacagccgtaccggatggacgtgctgaaggtgctggcggtggtgatcggggtgagcgtgcgcatcggcgggcgcgccgaccagatcctgcagcgcatgggtgatttcatgcgcgacctggagcaggcccagcaggagctggccgccaccacctcggaaacccgcatgtcggcctgggtattggggctgctgcctccggccagtgcggtgctgatggcgatctccagcccgtcgttcttccagccggtgctgcatgacccgctcggccacaggatcctgctgatcgcactgggcctggaactgctcggggcgttgctgctgtaccgcctggccaaatcgctatgaccgcccgcagctacccgggaggtgcccgatgagcgccagcgcctggttcgccctttcgctgctggtgctggcagcgggcgtcgccctgctcggcattgccggctgggtgcgcagccatcgcgagcaccgcacctcggccgcgctgaagaccgccctgcagccgcgcgaggaagcccgcgacaccgaggccacgcgccgcgactcgctgggctggctcgagcgcttcgggcgctcgctcagtggtggccgcctggaggccgcgctgctggccaacgaggacaggctgctgctggacctggccggctggaacacgcgccgcggcaccgccatctatctcggcctgcgcctgttgcttgcgctgctggtgctggcgctggcgctggcgttcagcagcgcgcacggtctggccagggtgatggtggtgatcggtgcgctggcggccgggctgctgctgcccaagttcgtgctgtcgtcgtgggtcaagcgccgccgccgcgcggtcgagaacgaactgcccttgctgatcgacctgctgcgcctgctgcagggcgtgggcttcagcatggaccagagcctgcagacgctgggcgacaagctgcgcgatgcgttgccggtactgggcggcgaactgcaggaagccaacgtggcctacacccacggccgcacccgcgcgcagtcactgcggcgcttgagcgaggtctacgccgatgacgacctggccagcctgatgcagctgatcctgcaggtgcatgcgcacggcggcgccgtgcaggaaccgctgcgccagttcagcatccgcctgcgcgagcagcgccgcaacacgttgaaggaaaaggtcggcaagctctcggtgaagatgaccgtggtgatgatgctgaccctgttgccggcactgatgctggtgcttgccggtccagcgctggtcgcgctggccaccaccatgtccaagatgggatcgccctgatgcctgccctgcgcaccccctgcctgctgcttgccgtcgccctcgccaccctggccagtggctgcgcatcgaccacgccgaagtacgtgcggtcgcccagccttgcgccgccggagcccgatccgcaggacagccgcaacacctatctggagctgatcgagcgcatgcagcagcagggcgcctggtatgcctcgctcgcccacgtggaggccttccgccaacgctatggtgatcgccccgccctgcgcctgctgcaggccgacgccctgcgcgagactggccagagcgacgcagcggtcgcgctgtatcgcgagctgtccagcgggccgcaggccgccgcggccgcccacggcctgggcctgatcgctgcacgccgcgatgacgacgccggcagcgaacaggcgctggcgcgcgccacgcaactgcagcccttgaacaccgactacctgggcgacctgggttatgcgcggctgcgcgccggccagttcgaccaggcgcgcgagccgctggccaaggccctggaactgtcgccaggcaacgccaaggccacggccaacctcgcactgtgggcgctcctgcgcggcgaccaggccaccgcggagcgcctggcggcacaggccaacctcaacgacgaaacgcgccgcagcatccagcagcaggcccagcagatccgcacgcgcctgcagcagcggcaggcggcggccgccgtcaacgcccctgcgcctgcgtccgcggccagcagcgaacacggcgcccgtgcgtcgggcagcacccggctggcagccgaaccacgccgcgaagcacgtgacgagcgcgatccgcagcgcctgccaccgtcgatgctggaacgcttcagcaccaccgaacacccgaccggaagcacaccatgactgcgatgcgcctgacccgacgcctgttgcccatgctgtcctgcctgcttgctgccggtgccgtgcaggcccagcaacagccattgaccggacagatgctaggtggccccttgccgtcggcaccggccgcagcaccgatgcaggccgagccgcttcccaccgtggagctggccgcacccgccgcatccgcggcggtggcagcggtgccaccggcactccccgcaaccgacggtgccccgccggcaacaccgcgtgcgcgcctgcagagcggcgaagtcacccgcaacctgttccgcctgcaggcgtcgggacagcaggccggccagcgcctgccgatcctgggtgaccaggccaccctgagttatgcgcgttacctgaagagctttgaacacgagatcccggacttctttgagaccgatgttgcccggtccaaggatgcctcctcctccggacgctgaggtaggccatgaaacgcccacgccagttcagtttcggccgcgcacgcggcggcatgtcggtcaccatgatgctggtcatgctggccttgctggcgatgctgggcctgatcgagatcggctatctgttctgggccaagcgcgatgcgcagaaggttgccgatctggccgcactggccggcgcgcagcgactggagttgtgcagcgcggacaacagcgacaacagcgccgcccggcaaagcgcactggcccagaacaggttcgcaggcaccttgcaggtccgctgcggcaactggagtgccagccgcggtaccagcaaccgtttcgtcaccagcgttgatgccagcaacccgcgcaatgcggtgcaggtgatcgccgagcgcagcgtgctgcccttcttcggccagaacaccagcctgccgaccgtcagcgtgcaggcggtcgcccgccgctcggagcccacggcggtgttcgcggtgggcccgcagctgctgcgcaccaatggcgattccgtgctgctgtcgaccctgcgcctggtcggcctggatgtcagcaatgccacggtgctgtcctatgacggtctggcgcaggccaacgtcaccccatccggcctgctgaaggcactcaacatcccggtgagcgccaacctcagcgtggccgatttcaaccgcctgctgtcggtcaacaagatctcgctggcgcaactggtcgatgccaccgccaccgtggtcggccgtgactcgacggtgggtgtgcagctgcgcgccctgtccgacctggtcgccacccagctggacatcaacaagctcaacatcgtgctcggcagccaggccggcggcggcgggctgttcgcggaagttgtctcacccgacggcaccgtcggcagcgcactggaatcgaagatcaacgtgctcaacctgatcagcaccgccatctccatcgccaacgatggcaacggcgtgacgatcaaggggctggacctgctgggcatcaacatccagggcggcgtggtcgagccgccgtcgatcgccatcggcggcgtcggcacccgcgcctacaatgcgcaggtgcggctgatggtggacgtggacagcaacaacctgttcgcgcttgggccgctgctgaacctgctcggcacgcgcctgcacctgccgctgcacgtcgacgtggccaacggcatgggtaccctgaccggcatccagtgcggcggcagtccccccaaggccaccatccaggtcgattcatcggtgctgcgtgcctgcgtcggcaacgtcgaccccgcacagcgattctccaaggccaatgtctgcgacgccacgctgcagaacgaacagctgttgaagctgctgggacagccgctgatcaacgacaggatcaccctgcccgccctcaccggctcacagaacctgaccctggctgcgggcgagaccggctcgacccggatcaatccgctcgcgatcggtgacgcagtgtcgagcctggtcaacgagctgctgcgggtgctgtcgggcatgctcagctcgcccaagcagggcatgagtgccaacgacacggccaaggcgctggccgatcgttacctgcaggcggcctttcccactggcggacgctacaacgtcgaccaggtcatcccgctgctgcgcgatggcgatccggcacgcaacctcgccccgctgggcaactggacggtgaagaatggcgtccccaagccctgcctgctgggcctgaccacctgctgggaagacggttcggtgtggaccggttacaggacgaccgtcaccggccagggcctgggcctgctcgatggcctgctcggctcgctggtcggcggcctgctgatcaaccgctgcgacagcctgctcggcaacctgatcgactacaacggctgcgtgcgcaacaacctggcgtcgtacatccagaccgcgccggcgggtttcctcgatggcgccagtggcagcggcgtcgccaacccggacggaagcgtcagctgcagcggcctgctgtgcaccgtgctgaagccgatcctggccgcactgcgaccggtgctcaacagtgtcggcactctgctgaccaacctgctggccagcgtgctgggcctggaactgggccggaccgacgtcaacgtgcagtcgatccagtgcagcgcggcacagctggtctattgaaatcgcgccgtgaccgccgcccttggcggcgcccgcgcccatgctagactcccggcggggaaccaccttcatctcaacccacactcatccgtggatggtctagacatgcgagaaacttcagggggcgcggtcttcgcccggcacgcgcgcaacgcagcagtgctggccgtggccatgatgctggtggcaccggcggcgatggccgcgcgtggcgaccgcgaggctgcagccgaaccggcgcgcagcgcgccggtggtgcgcaataccgtggacgagctcaagcagttgatggattcgcgccagctgaccgagctgcgcaccacctacaacggcaactacggcgccagcctgctgttcaacgccaataccctgacctactacgtcgccctgttccaggagaagaacttctggcgggtgatcaagaccgatgcggtggacaacgccgaacgtgtctaccgcaccttcgcgcagcagtccgagcagctggcccaggtctacatcgacaccacccgcctggaagccggcaagcgctacaccgagcgcctggtggcctacaacgaagaacgcctgcgcaccctgcagcaggaaatggaacagcagcaggcacagtcggcgcaggtcagcgccgccctgcagcaggcccagcagcaggcagtcagcctcagcaccgatgtgcagagcaccaacagccagctggacgccctgcagcgccgcatccagatcctgcaggccgaacagggcaacccggagttgagcctgcccaagccggacagcgtgccctcgccggcaccggccgccaccagcgacggccgctgagagctgcactcacggcattgcacacgacggcgccccagggcgccgttgttgttttcggcgcttcagtgcacaacttcactggcaggcgtcgtagactgcatcatccagctgccggcgctgcacgaaatccaaccgccgacgtttgagcagcgcctgtccgcgctggcggcgcacacgctcgcaggccgccgcatccgtactgatcgtgatcaatgcgccctgcgcccggacggcacgacgcgggcgacgcgacggcttcgatggcgtgactgcgggaaccaccgccccacgggacaatgactgctccgccgggacatcccagcgccacgccgcccggccctggcagggtgtctgctggtagaccggatgcggtccatccacgcatttgtagacattggtctgagccggcgcggccatcggcaacagcaggcacaacagcagggaccatcgcgtggcgggcatccgggcattccacaggcgggctgcggacatcctcggcgcgcgactcgggtcccgccagagcgatatgcgtcacatcctctgcaatccagcacagcggtgcaagtccgtcgccggcacctgcgctgtactgccgaaggcaccggcagcctgccggtgccttccctcccttccgccaaggaacctgcaatgagcaacttcgtcaccgtcgccgacggcgcccgcatcttctacaaggattggggcaacggccagccgatcgtgttcgcccacggctggccgctgtcgtccgatgcctgggacccgcagatgctgttcatgggccagaacggttaccgcgtgatcgcccacgaccgccgcagccacggccgttccagccagacctgggacggcaacaacatggacacctacgccgacgatctggctgcagtgatcgaggcgctggacctgaaggacgcgatcctggtcggccattccaccggcggcggcgaagtggcccactacatcggccgccacggcagcacgcgcgtggccaaggtggtgctggtcggcgccgtgccgccgctgatgctcaagaccgccggcaacccggccggcaccccgctggaggtcttcgacggcatccgcaagggcaccggcggcgaccgttcgcagttcttcaaggacctgaccaccccgttcttcggcgccaaccgcgatggcaacacggtcacccagggcatgcgtgatgcgttctggctgcagggcatgctcggtggcgtcaagggccagtacgactgcgtgcacgaattctcggaagtggattacaccgaagacctgaagaagatcgacgtgccggcactggtcgtgcacggtgatgacgaccagatcgtcccgttcgatgcctcggccaagctctcctcgcagatcatcaagaatgccgaactgaaggtatacgccggtgccccgcacggcctgaccatcacccacgccgagcagttcaacgccgacctgttggcgttcgcgcgcagttgatgcgccgcggcggcactgtaacggtgccgccgcaccttcgatcgcaaaaaggggacggaggggattaagtcgtttgtgcacaaacgacttaatcccctccgtccccttttttttcagatgtcggtgtggtgatgcggcacagcgacaggcagcgggtcatgcccacccacgaagtggcgcaccaccggcgcacgctcaccgcgatgcaatccgcgcagcacttcctggatcgccctgtcgtcggcggtgatgcgttcgtgctggcgcaggtgctccagccacgacggggtcacgaaatactccaggtggatgcccggggtggccacatcctcgaccacgccccagaccacggcgccatcgcggcggcggatggtgcccagtgcgcgcatctgcgcctggaacgcggcgcgatcagcatcgtcaatgcggtactcgatggtcaccagcaccgggcctcgatcattggataccggtaccgacagttcgggggctggccagtgccccgccggacgcaggttcaggtcttcggtgccggcgatgcgcacgcgccacaccagcaacccgccgatgaccgcacccgcggcagccaccagcagggccagctccggtgaggtgcgctgagccagtgcgccccagctcaggccgccggcggccatgccggcagagaacaccatgatgtacagcgccagcgcacgcgcacgcacccacgccggcactgcggtctgcgccgcgatctgcagcgacgacagcacggtgatccacgcaaagccattgaccagcatcaccagcggcagcacgtaccagcttcgggtcagcgccagcccgaccaggctcatggccagcgacagggtcgccagcagtaccagcaggtcgcgatccagctgcgcgcgcagcttcggcagcagcagcgccccccccaccgcaccgatgccgatgcagccgagcagcatgccgtattggcccgccccgccctgcatctgcccacgcaccaccaccggcagcaacgcattcatcgctgcggcgaagaagaagaagccgaccgacttgatcagcaccgcctgcaaccgcccggcgcggctcgcatagcgcaggcccgctttcaggcccgcaccgaagccttccggcggcaggctggactgcttcgggtcgcgcttccagccccacaccacgaacagcattgcggcgaaggtgatggcgttgaagccgaaggcccagaccgcaccgagctgggcgacgatcacgccgccgatggccgggccgatcgagcgcgcgatgttgatgccgatcgagttcagcgccaccgccgaggccagcatcggctgcggcaccagttcggacacgatagcggcctgcgccggcatcgccatcgccgcaccgcagcccatgcagaaggtcagcagcaccagcagctgcggggtcagcatgtccatcgcggtcagcgccgccatcacggcggcgaccagcagcatccaaccctgcgtggccagcaggtacctgcggcgatcgacgatgtcggccagggttccggcggccagtgccagcagcacgatcggcaaggtggtggccgactgcaccagggccaccatcaacggcgagccggtacgttcggccatcacccaggcggcggccacgtcgttgacccaggtgccgatgttgctggccaggatcgccagccagatcgagcggaacatctggatcttcagtggggaccaggcgcctgcggcctgtgcggggggttgcgacgcggttgcgttcaccattgccatgctccaacgatcgaggcgaacagcgtgtcccggccgccggcctgcttcagtgcaggcccggcatcgacccaggccagctgcagctgccattgccagtgttcgctggcctgccagcgggtttcggatttgtactgcgtgccgatgcggcgcgcgccgccggcgctgcccggcaacgccaccagcggtgccggcgtggtgtagaccgcatcggcgcgacgatgcttccaggccatctgtacgcccagttccgtggtcaccgcgtcgtgcaggcgcagtgtcagggtcggctggacgtccatcaggttggccggggccagcaggctggcctcgctgaaataggccgacttcgggaacaaggcattgaaggtgcccaggcggccgtcgtgcagattgccatcgccactggcgatgtcggccttcagccccagacgcggctgcagcggcaggtccgtccagcgccaccccgtatcggtggccagcgtccaggcgtggatagcgagcgtgccggcggtcgttcgcagttcaccgccctgcgccaccagctcgctgttccagtccagtgcaccagcctggccgaaccagcgcgcgcccagggtctgccgacgttcggtgccgctgccggcggcaaagcgcgcgccgtcgcgacggtagtcaagcaggtacagatcccactgtcccgcgccccgcccgcgtgccgtggtggcataggcaccccacaggtgggcgccgtgttcgccgcgatcatcgagggcacccggtcggttctccagcggacgcagcgccatcagttcaagcgtgccggatctacccttccaacccacgcgcgcaccgtcgaacgccaggcggatgttcggcccatcgcgcaccgacaacagccgcgagctgccatagccggcttcctgccggccgagttgcagatcgaagccaccgcgctgccagcgccagtacgcctgctgcacgtccagcgcgctgcggtcggtgcggccgggtccacctgccttgccattctcggcatgcacgcccagctgcacccgtgcctgccagttgtcctcgacatacgtggccgacgccagtgcacgcagcagaccgtagccgtcttcactgccgccgataccgaatcgggccgggtggtagtacaggccacgcacgcgcagtgaggcatcccactgcaattggccgtcgccgacgtcgctgcagcggccgccgtcgcaggccagccccagcgctggcgcggccagcagcgccaggctcagaaggcgaagcacgagcatcccatcgcgccccagaacgcggtcaggtcatcggtgggtgccgcatgccgggccgcatgcccgtgcgcgccgtgggtgctacaggccacaccgtgatggtggcgatgcgcggcggccaatccggtggcggcaccgccaacgtggtagccaccgaagcggttgaccggcgaccagtccggcatcgccggcggcagctgcggcgccaggccggcgtaatcgccgtcggcgtgcacgatgcggccgccgaccacggtcagcaggctggtgatgtcggcgatctgcgcgtcatcaacgcggaagaagtcggccgagagcaggatgaagtcggccagctggcccaccttcagcgtgcccttcaccgcttcgtcgccggagaaccaggcgctgccctgggtccacaggcgcagcgcctgttcgcgctcgagcaggttctcatcgccatacagggccagcccgcccacggtgcgcccggtcaccagccaggacaacgccacccacgggttgtagctggccacgcgggtggcatcggtaccggcaccgaccggcacgccttcggccagcatgcgcttgaccggcggcgtgtgccgcgccgcctgcacgccgtagcgctcgacgaaggcttcgccctggtaggccatgcggtgctgcacggcgatgccgccgcccagcgcgcggatgcgttcgatgttgcgcggggtgatggtctcggcgtggtcgatgaaccagtgcaggccatcgaacggcacctcgcggttgacctgttcgtacacatcgaggatgcgggtgatgctctcgtcataggtggcgtggatgcggaacggccaacgcttctcgaccagcagtttcaccacatcgtgcagttccggttccagctcaggcggcagttccgggcgcggctcgttgaacagctcgaagtcggccgcggagaacaccagcatttcgccagcgccgttgtggcgcagcaggtcatcgccctggcgcggctgcagtatctcgctccagccgcggaagtcgtccacttccttgcccttgttctgggtgaacaggttgtaggcgatgcgcaccgtcagctggtcatcgcgatgcagctgctcgatgacctggtagtcctcggggtagttctggaaaccaccgccagcgtcgatcaccgaggtgatgccgagccggttcagttcgcgcatgaagtggcgcgtcgagttggcctggtactcgatcggcaggcgtggccccttggccagcgtcgcatacaggatcagcgcgttgggcttggccagcagcagcccggtcgggttgcccagcgagtcacgcacgatctgcccgcccggtggatccggcgtgtccttgctgtagccgcaggcgcgcagcgcggcgcggttgagcagcgcgcggtcatacaggtgcagcaggaacaccggcgtatccggcgcaatgtcgttgagctcctgcagcgtcggcaggcgcttctcgttgaactgtgcggcggtgaagccaccgaccacgcgcacccactgcggtgccggggtgcggtcgacctgggccttcaacatgtccagcgcgtcgcccagcgagcgcaaaccgtcccagcgcagctccaggttgtagttcaggccaccgcggatcagatgggtatggctgtcgtttaggccgggcagcaagcgccggccctgcgcatcgatcagggtcgcttcattgccccagccgcgcatgatctcctcatcgctgccgacagcgacgatgcggccctcctgcacggccagtgcctgcgcgtgcggctgctgcgggtcgagtgtggtgatgcgggcattgcggatgaccagcgtgctcatgcgacgctccttggaagtggaatcgagtgcggcagcggcgcgaccggccaggccgagcgcaaccgcggcaccgctggccagcaccacgttgcggcggccgtggtcggggggatcgtgactcatgcgaaagctcccggaagacgttggccgtccagcgcccaggcccccggcccggccagggcgatggccagcagcaccgtggcccacatcagcgggtactcactgccgccgcgcatccagaaccagcccctgggcaaggccaacaggacggtgaagccgatgaaggcagcggcggcaagcgcggcgatgcgggtctgccagcccagcagcacggccagcccggacagcacctgcagcagggacaacagcagcggcaacggcgccactgccggcagcccgaaaccgcgcagctcggtggcgaagccggccagccccggtccgccgaaccagccaaacagcttgcccagcgcgtgaggcagcaggaagccgcctgccgccacccgcagcatcagcagggccaggtcgaggccgtggcctgccagcatgctcagtgcccgccttcctgcgcgccgaacatgcgcttggcgtactggatgccgatgccatagccgccggcgtggtcgcgggcgatgccggtggtcaggtcgtaggtttcaccgcgtgcccagtcacgctgcagttcaagcaggtactgcacgctggtcatcggcacggcgccggcctgcaccatgcgggtgatcgcacgctcgtgcgcttcttcgctgacatcgccacaggcatcggtgatcacgtggacctcgaagccctgcgccagcgccgacagcgccggacccacgatgcagacactggtccacaggccggcaagaaccagccggcgcttgccgatgcggttgatctcatcgattaccggctggtcttcccaggtattcatcgaagtgcggtcgaacaccggctggcccgggaagatctgcggcagttccgggaacatcgggccggagaatgacgtctcggccaccgtggtcaacacgaccggcacgttgaaccccttggcccccttgctgatcagcgacacgttgttgcgcagcgcggagatgtcgatcgtgtgggtagcaaatgccatctgcgactggaagtcgatcagcaccagggcatggtcggtgggcgacagcagggccggggcgggcgtggcggtggcaaggctcatgggtggactccgtgggaaacatgatcagggggaagcagcagggccgcatcgccggcccgatactggccggggctgcagccggtctcggcgcggaagctgcggacgaaatggctctggtcgaagaagcccagctgctgggccaggcacgccatcggcaactgcgcgctgggcagcagttggcaggcacgctggatgcggcggcggcgcacgtagcgcagcgggctggcaccggtgccgctacggaacaggcgcaccaggtggaagcggctgacacaggcagcctgcgccagctcggtcacccgcagcggctgcgacaggtgctcatcgacatagcgcagggcgcgctgcagtgcggcggcctgctgcggggcaagtgggatggcggacggatcgggcggactgacggtggccatgcggggcgccgcgagggggtggcccatggtgcgctgccggcgtgcgatgccctacccccgtcggtcgaggccggcacctacccgaatgggggaggccggcggccgagcaggcggcgcccgaacaagcgcgcatccaccgagtaggcgcccggccccagcatcagcagcgccggtggcaacgccaccagcggccacggcgcctgctgcgcgaacatggtcgcggctgccatcagggccgccagcggcgtcaacacgcccagcacgagcatggccgccgccagcccgcacagcaccgccccccaaccagcatgcgtgccaggcgcgcacagcgcggcggccaggcacagccgcagccacagcaggccgacgcccggaccgcgatcaggaaacatcacgaacaggcgctgcatggccgggctccaggggacatgccggcgtgatagccgaccacggcggccactgcctaccccgttcgggtcaccccggactgccccgcacctgccagaatgcgcgccatgcgtggccgccccttcccgttgcaacgtcacctgcggacgctgctgacctgcctgctgctgttgaccgccctgcccgcccttgccgtgcagcgcccgccggtgagcgacgggttgcccgattacgagcacacggcctggcgcgtcggccagggcgcccccggtgacatctgggacatcacccaggaccgcgatggcctgttgtggctggccaccggctcagggctgtaccgcttcgacggtcgtcgctttgaacgccaggccgctcccgcgggcagccatttcccgtccaccaacatggtcacccttgcgcggggccgcgacgatgcactgtggatcggctacttccaggccggcatcagccagtttgcgcgcggccagctgcacaactacggccgcgaccagggcgtgccggtgggtgtggtgccacacttcagccaggaccgtgacggccggctgtgggccgcgatcaatggtggactacgccagttcactggccaacgctggcagccgctgcccgctggcatgggggtgccggaacatcgcgtgcaatggctgctgcacgacagccgcggcaccttctgggtactggccgacctgaagatctgggtgcgcgcggccggccaggcggccttcaaggacaccggcatcgccgtttcgcagatggcgacgctggccgaaagtccgcagggggaagtgtggctggccgaccgcgtgcgcggtacgtcgccgctggccaacgcacgaggcctgctgccggacagcgagcgcgaggcacggcggttgccggagctggtggcggcgcgcctgcagttcactgccgatggcgcgctgtgggcaacgatgagcccgcatggcggtgtcgcccgggtcaccttcgatggcgaccgcgccatacgcatggagcgcttcgattcgccgcacgggctgaccgccacctcggccgtgccgatcatcgttgatcgcgaaggcaatctctgggtcggcaccaatctcggcctcaaccgcttccgcgcgcgcagcgtgcacacgctggcggttggtcccagtgatccctaccgctcgctggtgcgggccagcgatggccatgtgtatggctatggcgaagacctcaagccctacgacctcgagcgcaccctgctcgatggcagcgccacgcagctgcaggccgccgcgcgccaggccgctgccccgatctggcagttcgactgggtcaaccttgcgcgcaccgtggccggccgcaccacgcggattccgctgcctgcgccgttcaccgggcaaccactgcatgccctgctgttccccgacgacgaacaggcctgggtctgcaccggcgaacggggggtgctgcactaccagcagggccagtggcaacgcgaacgccgcctgcccgaacaggcctgctcgtcactggcgctggatgccaacggccagctgctgctcggctatgcagacggccggctgcgccgcatgggggcgacgcagatcgaaaccttcgacgccagccacggcctgtcggtcgggccgatcacggcggtactcgatcatcaggacctcctgctggtagccggcgaggccggattggccgtgcgcccgggcaatggccggttcgttcaggtgagcaccgacatggccggcgtcatggaaggcatcaccggcatggtggccgatgcgaatggctacctctggctcaatggcagtcgtggcctggtccggctcgggagcgatcagctgcggcgcgcactgcgcagccggcagccggtgacgccccgcctgttcgatgcggtggatggcatgccgggcatcgccctgcagagcggaccgatctccaccaccgcgctggccagcgatggcctgttgtggctggccaccaaccagggcctggcctgggtggacaccacccgctcgcacgtcaacaccatggcgcccagcgtgcacatcggcgacgtgctgtatggcagtgaacaccagccactgcgcgacggcctgcgccttccggccggcaccagccaattgcagatcgattacgtggcgctgtcgttggcgcgcccggagcgcaaccgctaccgctatcgcctgtccggggtcgacgacggctggcaggatgccggcagcagcacgcgcgcgtattacaccaacctcgcaccgggcaattaccggttcgaggtggaagccgccaacgaagacggcatctggagcactgcacccgccagccgcaccttccgcatcgcccccaccttcatgcagaccctgtggttcaagctgctgtgcgccgccgcggtgcttgcgctgctggtcctggcggtgcgcatccgcagcgggcagctggctgcactgttccgtgcgcgcctgcaggaacgccatggcgaacgcgaacgcattgcccgcgacctgcacgacacgctgctgcagggcagccagggcctgatcctgcggctgcacgcgatcagccagtcgccgcagaccccggacagggtgcgcggccagctggaatcggcgatgcagctggccgaacgcaacctggccgagggccgggagcgggtcaacgcactgcgcgacggtcctttcgcgggccgcgacctcgcttcggcgctggccgatgttcacgccgaatacgccgggcacggcaccaatccgctgcgcctgactgtggaaggcgcaacaccaccgctgcaggccgatgccgccgaggaggtgttcctgatcggccgcgaggccatccgcaatgcactgcgccacgccaatgccagcgccatcgaggtagagctgtcctacggcgcgcggtgcttcctgctgcacgtgcgcgacgatggcgtcggcatcgccgacgaaaatgccgggcatggccattggggcctgcagggcatgcgtgagcgcgcgcagcgcctcggcgcggagctgcggctgtggacccgccccgggctgggcactgaagtcgcgctggcggttcccgcccgtcgcctgtatcaccgccgcccatcgcgttggcgctggccctggagtagaagccaccatgactgagtcccctgccccgatcggcgtgctggtggtcgacgaccacccgctgctgcgtgacggcctggccgcgctgctgggcgcccattccgacctgcgcctgctcggcgaggccgccgatggcgaggaagccatcgagcgctatcagcagctgcagccggacgtggtgctgatggacctgcagatgccacgcctggatggtgtggaagccatcgtgcggatccgcgcgatggacccgcgtgcgcgcatcatcgtgctgaccacctatcgcggtgacgtgcgtgcggtacgggcgctgcaggccggcgccagtgcgtacctgttgaaggacatgctgcgccacgagctggtcgatacgatccgcatggtcgctggcggccggcgcgcaccgataccaccggcagtcgctgcgagcattgccgcacatgtggtggaggaccggttgtcgccgcgcgagaccgaggtgctgcggcatgtggccggtggcctgtcgaacaagcgcatcggcgagcgcatgcagatttccgagcagacggtgaaggcacacatgaagagcctgatggacaagctcggggtgggtgatcgcacgcacgcggtgacccaggcgctgcggcgcggcatcatcagcctggacgacagcggtcacgactagggggttgttcggcagggcttgcagccctgcacccgctacgcgctggagcaacagcaacagcaacagcatggattccgtgggatggcggggcggtgtcggactgcggggacgctgcaagtacgtccctgcaagcttggcagccgcatccatgcggctgacaccccgcactccgacaccgccccacctctgacggattccgatggcgtttggtaggtgtcgaccttggtcgacacttctgtcagatatcgaaatcaatcaggggtcagatccgttttccttcggaaaacggatctgatcccaagagccgttccaacagaccgcaggaacatgtcgaaggctactgaaaatccgctgtttgcgctgttgtcggccagcggccggcactaccgcaggtgcagggctgcaagccctgccgaacaccacccctacttcaaacgcagcagcagactgccgcccgcgcacatcaccgccagccaggccacgccgtgccacccccactgcgccagcgccaggctgcccagcgcaccgccagcggccatgccgatgaacatgccggtgaacagcagcgcgttgagccggctgcgtgccggcggcaccaggccatagaccagcgtctggtgcgccaccagcgccgactggaaaccgaagtcgaacagcagcgcactcaccaccagcagcggcagcagcgcggcggccggcagccaggcttcggccagcagcaggccgaagcccagcagcgccaccgcgatcgccaaccgcgccacggcatggcaacccaggcgatcagcgaaacgtcctgcgaacggtgcggccagcgcaccggccgcacccgcaataccgaacgcacccgccgccgcactgcccaggcccaggcgggcatgcagcatcagcgccaacgtcgaccagaatgcgctgaagccgaccgccagcaacgactggctcgccaccgcgcggcgcagctgcggctgctcgcgccacaacgccagcaacgagcccagcaacgccggatagcgcagcgtgctggtcggtgcgaaacgcggcagcgcacgcgccatcactgcgcccatcgccgccaccgataccgcggccagcacgaactgcgtgcgccaaccccatgcctcggccaccacgccactgaccacgcgcgacagcaggatgccgagcagcaggccggtcattacccggccgacgatctggccgcgctgtgcatccggcgccagcaccgcagcggccggcacgatgtcctgcgccagcgtggccatcagcccgaccagcaggctggccatcagcaggcccggcaggtgcccggccatcgctgcggcgcccagtgccaacgccagcagcgcggacttcaacaggatcaggtggcggcggtcgaagcggtcgcccaacggtgccagcagcaggatgcccagcgcgtagccgagctgggtcagggtcggcaccagcccggcggcgcgctcacctgcgccaaggtcctgcgcgatcaggcccagcatcggctggctgtagtacagcgaggcgaccgaaaagccggcgccggccgccatcgccagcaccagcggggtggaaggcgcgttcgcgggtgcgacgacggacagcgaaggggtagacatgggggagtccggtggaggaagtgggcgtatcctgcccgtattcgccatgcgtctgtagtaggctcctgcacatatacttcatacgtgacacgcatgaatgacctcgccaccggcgccgatcgcctggatctgctgcgcaccttcctgcgcatcgtcgatgccggcagcctgtctgccgccgccgtgcagctgggcaccacccagccgacggtcagccggcgccttcaggcactggagcggcagctcggcctgcgcctgctgcagcgctccacccatggcctgcagctgaccgaagatggcctgcgctgccagcgccatgcgcaacgcgtggtcgacgaatgggagtcgctgcaggccgaactgcacggcgaaccggaaacgctgcgcggacgcctgcgggtgatggtgccgcatgccttcggccaggcgcagctgctgccgaccatgctcgcgttcctcgcccagcacccacagctgagcctggagtggatcctggaagatcgtcgcccggatttcatcgccgaaggcatcgactgcgcggtgcgggtgggaccggtcgacgaaccgcgcatggtcgcactgccgctcgccgaagtgccgcgcatcgtcgtggcagcgccctcgctggtgcaggccaccgcgatcagcacaccagaacaggcgcaggcactgccgtggatttcactggtcacctactaccgcgaacgcctgctgctgcatgacgcacaggggcgtgcgcataccctttcgatcagcccgcgcctgctcagcgacaacctgttcgtggtgcaacaggccgcatgtgctgggctgggtgcagcggtggtctcggcctggctggtggccggagacctcgcacaagggcggctggtgcagctgctgccggactggcaggcgccggcgctgccggtacacgtggtatttcccgccgcgcgccagcagccgccacggctgcgcgccttcatcgatgcgatgaaggccgcactgccgcagctgcacggaatgcggccggcaccgcgttaggtcaccgaccgcatcgaagccacagggtcggatcccttcccaccgggaagggctctgaccctgtcgatcactgcgtcttcgccgcctcggcattccacgccgccaccttggccttggtatcagccaacatcttgtccagcgcggcgcggtcatacacgttgccacgcaggatcacgctgtcgatcttttcggtggcggcaatgtcccgcagcgggttggcggtcagcagcaccagatcggcggccttgccctgcgcgacacccccgtaacgattcatctggccgaaccaggccgggccggaacgggtcgcggcagacagcgcctgcggcgcgctcaagccctccttcacgaacagctgcagttcctggtgcagggcgatgcccgggaagttgaacgagttgaggaagcccgcatcggtgccggcgatgatcgtcacgccggcttcctgcagcatcggcagcacggcggccacctggtggtactgcgcatggcgcgcttcgatctgcgctggcgttgccttggcggcacgttcaacgcgccactggtaggtcgcgcgcaggcccgggccgatgtaagccaggtacggatcgttcgcgtggtcatcctggtcaaggaaatcgaggatgcggccaccgttgagggtcggggtcacgaacacgccgcgcctggcgaaatcgcggtaggcatgcatcgccgtatcgcggtcgaagctggcgtcgaggcggcggttggcttcggcgcggtcgatgcggccggcaccgaagtcgccggcaatctgcgcctcgtccttgctcccggccttgaatgcgtagtccagatgctcgatcgaggccagcccggcatcgattgcctgctccacggtcagcgccatcgggatgtgccccgacgccttgaatccggcattgcgcgcggcactggccgagtacaggaacagttccggcttcagcgtgctgtcggtgatcttcacgaaatcgaccttgtcgtgctgcaggcgggtgatcgccttgtcgacgtcggccttgctgcccacttcgatcgtgcccttccagaccggcttgaggccttcgatcttcgcgcccgagctgagcagccgcggaccgaacagcgtgcccttggcaatttccccgcgccactgcagcacctgctcgggcaggtcgccggaacagtcacgcaccgtggtgatgccgtgcgcgatgtacagcggcagcagtgccttgttctcttcgatcagcgccgggccaccaccaaagtgcacatgcatgtcccacaggcccgggatcaggtacttgcccttggcatcgatctggcgggccgtgctccactggctgcgcagctgcgcatccggaccgaccgcgacgatgtcctcgccacggatcaccacgctctgcccggtcagcgtgctggcgtgctcgacatcgaccacggtggcattgcggatcagcaggtcggcgcgctcggcggcagacgccgacagcggtgccaccgcaaggaggatggcaagggacaacggacgggaacggaacatggacagcatcctgatgggcacgcccagcgtgcgggtggaaggggtttgcattcagcgcaccgcgccgtgctggcgcagcagggtctcaattccggtatagccgcgctggcgcgcatgcgccagcggcgtcacgccctcgccgtcggccagctccgggtcggcaccggcctccagcagcaactgcacgatctgcaggtggcgcgcaccgccatcgccgagcaggattgcttccagcagcgcggtccagtgcaggcggttcacatgatcgaccgccacgcccgcgcgcagcagcgtacgtacggtggcgacgtggccacgctcggcggccggaatcagcgcggtgccgccatagcggttggtgctgcgcagatcggcgccatgcgccagggtcatcgccaggatctcatccaggccccgcgcgccggcgtacaggtaggcgctgtcctgcatggcgtccttggcattgacgtcggcaccggcttcgatcagctcgcgcgcggcatccacgttgttgccctgcgtggccagtagcaacgccgtgcgaccctggccatcgcgcgcctccagcgtggcgccatcctcgatcgcctgccgcaccgcatcggcgtcgccgcggctggcagcatcccgcaggcgcgcgtctgcgtcggcccgggacgtggcggtgcaggcgggggtgaccatggccagcaggcacaacagcagcacgcgcgcgaacggcgcaggccagccagcggaatgatggacgcgcatgacagtgtctcctcatgtccgtcgccacggaacgccgtgcgacggtagcaacagccgggcattgccggcccctgccctgcatggtagaagtcggcctgggtatccagaagtgaaatgttcaaatgcaagacagtgccaaatcgaatagaaccctgttcgaactggacctgctgcgggcgctggtgatggtggccgactgcggcagcttcaccacggccgccacccgcctgcattcgacccagtccacggtcagccagaaggtgcgccgcctggaagagctggcggggcatcgcctgctcgagcgcggccaccgcgacgtgcaccccaccgacgccggccacaccctgctcggctatgcgcggcgcatgctcgacctgaacgaggaaatggcgcaggcgctggccggcgccaccgtggaaaccgcggtgcgcatcggtgtccccgaggacttcgtcaacgcgcagaccacacgcatgctggccgccttcagccgccgtcacccacaggtgaaactggaaatcagcagcggcctcagccgcgacctggcgcacggcttcgaccacggtgaactggatcttgtgctggtcaagcagcggcgcaacagccgccaggcggtgcactgccgccgcgagccgatgcactggatcgacagcctgcgcagcagctgcctgcagcaggacccgctgccgctggtcaccttcccgccgcgcgggctgtaccgcgacgagatgattcacgccgtggaagcgctgggcctgcgctggcgcatcgctttcaccagctcatcgctcaatggcatccagggcgctgtcgccgacggcatcggcatcagcctgctgccgcgccgcgcggtgagccgcgatcatcgcatcatcgatggtgagcgcgacctgccggtgatcgacaactacgaaatcggcctgctgcatcgtgcggacgccgacgatgcggtgcgtgcgctggccagcgagctgtggcggcaggtgcagcgcgaaccggattgaccactgcaactgcggtagcgtgggccgctggccggcagccgcgacggcaacatcgtcccgcgtggggtcagatccgttttccgaaacggatctgaccccgaagcgaaatccgcgcattgaccatcgaaagctgatcacgcctgtcgcgcggaagtcacggctctgccgctagagtgccccctgtttccgtgctccacggcgcctgccatgtccgacgaaatccccacccgcttcgatccgctgcctgcggcgctgcagacgcatctgcaacaccagcgctcgctgatcgccgcgcgcgtggcggccggcttcccgacgttgccggtgcaatggccgctggcggccagcacactgcagcgcgtggtcgatgccgagctgatcgaccgtgacgactgcgatggctgggaagcgctgggcgtggcgttcggcgataccctggcccaacgggtgccgggcctggcctggatgcaggtcaccgacgcctggggcatcgatgcagtgctgcgctatgccgacagcagcctgcagatcggcgccagcacactgctgctcaagcgcgtcgaacagggcgaagtcatcgacatcgcccacctgctggcgtggctggaagcgttcgtcgctacccgcgccgacgattacgcctgacggcacatcggggtggatccacgccatccgtggatgaatgagaccacgcgatggttccctccacgcacggcgtggatctacagccagcggccgtcaactaccacccggcgctccaccggcaccccggccacggcggccgggccgtggtcggcacgcacggccacgaaggtcgccggccggccttcggcaatgccatgctgcggcaggccgatcacctgcgcggcatgggtggtgaccatgtccagcgccagcatcaggtcggcatcggtgtagaagccggaacggtagcccagcaacatcgcccgctgcagcaggtcgccgttgccgtaaggccaccagcagtcgcggatgttgtcgttgccggcgaacacgcgcacgcccgcatcatgcagtgcgcgcaaaggcggaaatggatgatcacccggcgcgttgctcatgatcgcaacgcccgccgtggccagtgtttcacccacctgcagcgcgcgcgccagcggcacgtcgcccagcgagtaggcatggctgaccgcaacgcgtccctgcaggccggcggcacgggtgcgtgcggcgatgcgcagcagctgggccagtccggtttcgccgggctcatgcaggtggatgtccagctgcacgccatagcgctcggccaggccgaacagcagggccagctggccttcggcatcgccgtcgagcgtggtcggatctatgccgcccagcacctccacccctgcggcaagggcctgctccagtacggcggcggtgccgggacaggacatcaccccggcctgcgggaacgccaccagctggatccgcatgatgtcggcgcagcgcagcgcggcctcgcgcactgcttcgagatgacgcaggccggtgctgccgtcgacatcgacgtgacagcgcatcgccaccgtgccgaagcggctgcactggcggatcaaggcctcggcacggtccaccattggcgccgcgcccgccaccgcggacttctccaccgccagccgctctcgcaggctgttcaccggctgatgcgggtgccagcggtcgccgacgaagctcttgtccagatgaatatggccgtcgaccaggcccggcaggacggcacagccctgcaagtcgacgggttccgcaccctcgcgcggcgcagcatcaccgttgagaccactgatacgaccgttgtggatgtggaaatgcagcggcgcgccctcgcgatcaaccgcgccatggacgaactgaagcgtcatcggaaactcccggaaagccaagtcatggcgccatcctgcgcgctggcactgccatcggccaacgaaatatctggatgccacacattcatcagaacgatgaatgccgccgcgacggcggctcgcagccacgccgtgcacacgcctgaacgggtaccataggcacctgtttccgctgtgatgccgcatgggcccgtccgaccgccacgatcgtctccgccgctggcaggccgcgtccctgctggctgctgccccgatggccagcctgtccgccactgatgcggccgccaccgcgccgctgcaggcgccgcctggccaacagcgcatcgccccggctgcgctggtcgagcggctgcaccagcgtgtgctttccgggcagagcgccaccgccaccctggaacactggtgcgccgaacacggcctggccgaacaggcgcgggtgcgcgcggtgcgtgtacacggccaggacaagacagcaccggccgacgtgctgcaggcactgggtgcgaaacccggcaccgcccttcgctaccgccgcgtgcagctggtctgtggcagccgcgtgctctccgaggccgacaactggtacctgccggaccatctcagcccggccatgaaccaggtgctggacagcaccgacgaaccctttggccgcgtggttggcccgctcggcttccagcgccagacactggctgaccagaccttctggccaccgcgtggcgaaggcgaccgcggcgtgatcctggaagtgcgcgccctgctgcgcgatcgccagcagcagcccttcagctacgtcatcgagtcgtacctgcagcaggcactgccctaggccaccggcgcccgccatcacagcggacatcgacacagcagaaggcccggcattgccgggccttctgtttgccagccggatcagcggaaccggtagtccagctgcagccagtactggcggccatacgggtcgtagttgccaaccggatagaacggccagccgccaccgttcctgtccgccggcgggcggctgtcacgcaggttgttgacgatcacgcccaccgacaggttctcgccgaactggcggaacacgctggcgttgtaggtcatgtacggcgcgatgcggccactgccatcggtcttcggcagtgaaccgaaacggttgccgtacagcgtggtggtccagtcaccctggttccaggtgatgctgccattggccttgctgcgccactggtagtcatccagcgaattgcggatgtcacgctccggatcatcggagaactgccggtacgtgtgctccagcaccacggtataggccaggcgcgtagtgaagcggccatagcggccggcatcgaaacgccagttacccttcaggtccaggccacgcaccgattcggaggccgcgttgatcggattgatcagcacgcgggtcacctggtccggctgcacggttgcagtggacgggttgcggatcacccgcgacagcgcgtcctggcacagcggtgaaccgatatcgcgcgcttccccacccagcgtgcggcccaggcggcaatcggcttcgtcgcgcaggatgcggctggtatcgaggctggtgacctcgttgtcgatgcggatgtcgtagtagtcggcactgaaatccaggccggacagcggcgaccagaccacgccgaaaccataggatttcgcggtttccggctgcagctgcgcgttggcgcggttgctgtagtcgatcgacaggccgttgtagtcgcagttgtcgtacgactggcctgcggtgcggcagcgccagtagtcggtcatgcccgggttgtagccgcgggtctcggtcgcgaacacgtagttcatgtccggcgcacggaagctggtcgcagcagagccgcggatcaacaggctctcgatcgggcggaactcgacgccgaagctccaggtcgccttgccgatgtgctcgccaccggcgcgatactggtcatagcgaccggccagcgtcgtggtcagcgatttcagcaacggcaactgcagctccacgccggccgcatagcggtcacgatcaccgccggcaccgataccggcgctggtgttccagaactcgcccgtgcccagtcgcgggtccgggcggttgcggtagccctggctgccggcctcgaccaccgccgccaatgcagcgtcgccaccgggcagcgcgaacaaacggccgttgacgctggcgctgaaggtctgcagccacgccgcattgcggctttcctggtagccggacaggccctcgtattcgcccggggtcaatggtttgaacaggcgtgccgggtcgggcgcatagacctcaacgccattgcgtacgcccagcttcggaccgagcaggtattcgttgatgccggccagcagcaccggtcggcgggtacggttctcgtaacgcgagcggctgtagaccgcttcgtaatcccaaccgctgtcgccgatctggccacgtgcgccgacattgaacgaccacgagttttccaggaagcggttggcattgcgcggcaggccgccgatttcctccggcgcgaagcggcggtaccagctttccaggttgccggtgccctggttgtagaagtagttgcgggccgaggtccaggtcggtgcacgcgtgttgttgtagatccgcgcgctgcccacggcgacatcggcgaacaggtcggtggtctcgttgacgtggaaggtcagcagaccgtagccgttgagattgcgcttctgggtctgcacggtccagtagctggcggcggcctcgttgctgccgcagtaccagccctggcgcgggttgttggcacggaacacgctgccgccatagatgtccgacgcggcgtcgcagccgttgacgcccggatcgatgttgcggccggtggcagcattgcgccgataggcgatcgcggtcgcctgcggcgccttgccggccgggtcatcgtccagcgaatccatgaagtcgcgctggcgcgcgtggatcgccttgcgcacgtcgaactcgaaaccgaacaggccgtcccagcgctcgccggaactgccgcccaccacctgcacgcgctggttgtcaccgccgccctgctgggtgccgccggcgcgcacgttcacgtccacgccttcaaagcggtccttgaggatgatgttgaccacaccggcaatggcgtcggagccgtacaccgccgacgcaccggcagccagcacttcgatgcgttcgatcagggcgctgggaatgttggccaggttgacaacgttcaccgagccttcgtaggccagcgggtagtcggcctggcgacggccgttgaccagcaccagcgtgcggttcggacccagcccgcgcagattgatggtgttggcggccggcgtgaacgtattgccgaaatcctcgccctgcacgttgccggtgttctcggtcagcgcgctgagggcgtcgaaggcattgcggtagccctgtgcgtcgatctgctcgcggctgatcaccgtcaccggcgagggtccctcgacactggcacgtggaatgcgcgagccggtgaccttcacttcctgcaatgtggtgggcgcgctttcctgcgcgaaggccggcagcgaggccagcatcagggacgacagcgcgagcaccagcggacgcgggcgcatcgccttgtgggaggcggacatgggcttcctgggggagtgggcggtggtacgggagccgcagccggtacgacacataacgatcccgtaacgaaagtgtcctgaatgggtggtttcaacggaaatgaccagccctgatgggcttatgcctgaaccgaatcagacgcgtttacggcaccaccccacttttgcaatgaattgcatggcctggcgcgtcggtgatgcgcatcgtgccgggatgaccaacagcgccccttccacccacttcgctccactacgacccgtcctgcgccgccacttgctccacctccaggccacgcccatcaccctgcgttcgttccagcgtaccgacctgccacgctggcgtgccttcgacgaccgtcgccagcgcggccaacggccgtcctacggcattgatgaagaggcgcggttcctcgccagcgtctatcgttcacgcctgcaggaagacaacgacctgctggtgctgggtgtgttcgacgacgtgcagggcgtactgcacgaccagctgcatatccgcctgcagtcgctgcactcgcgctgcgccgagctgcaatcgctgcagcaccggcacccccatccgcaggcggcactgcgggcactgtgcccgttcctgttcgacgatgtcggcctgcaccgcctcttcgtgctgctgccgccaggctgcaccagcccgtttgcccaggcgctgcaggcccatgggttcatccgcgaagggatcctgcgcgactaccatctggacgcgcagggatggcatgaccgtcagctgctggcgctgaccgcgtcggcctggcgcagctgtcagcagccgatcggctagcgcacccgctccagtgccgcaccggcaccggtcaagaccgtgcaggcatggtcctgtagttcctcgccgctggcatcgttgccgctggcggcatccacgcgggtagccagcaggatgaagccgggcccgccccgcacctcgccgcgcccggccaccaccaggctccactggcccacatcgcccacgccgctcaggccataggccagcagattgagcggattggcggtcagttctgcaccgggcagcagataggcctggtactgatgcccgcgcagcggcaccggaaacggtgaccagcgcggaccgagcgcaccggcatgtgcatccagtgcctgcagcacatccgcgcgcaggcagtcgacatggatatgcagctggtgctgcgagcgaccgtgcggcgaattcagtgccaggctggccacgctgcgcggcagcggccggcccagggcctgttcggtatgcccgcgcgcctgccaggcggccgcaaaatagttgggtaccccacgctggtacaggccgtggctctcgatgccactgaccttgtccagcggcatcagcaggaactggtagtcaccgtgcgcatccttgaccagcacgtcgcggcggtcggccgccgtctccacccgcaggcaactgccacgcggtccttccaccgccttgcagtcacgctcgatcaagcgccacagcgcatcggaatgggccggcggtggaggtggcgcgctggcgcaggcggacaacagcagcagggacgacagcagcaaagggcggagggacacggcggcaactcacggaacaggcacggcagacggcgccgcgctgcattctagccagtgcagtgctgcagtcagtaggtgccgaacggcacttcaaccacgaacggggcctcgccgtcgccgccctgcagggtgtagcggtccagcgcgccatcgtcatcggcgtgcggctggcgctggaaatgcagggaataacggttgtcgcccagcaggacggcactgccatcgtcctccagcgcggcgccctcggggatcagcagcccgcccaggtcgctgtaggccccgggcacatcggcgaagccgtagtctgccagttcgtccacccgctgcatcgcgtagacatgcggcagataaggacgcgccgggctgcggccattgctcaggtcggtcacccaggcctgcggcaggtggtaccgctcgcgcagcgcggccacgcccagcgacgggctggccacctgcaggcaacacaccgcccgcttgccttcacggtcgaggatggcgaaacggtcgccgcgggtcgccgcctgcggcagcatggcgaaggccagattgcgctgggccggcgcgtagccggcctcggtctgaaggttgcgccacgcgccgaacaccggcgtttccgcggctgcggccggcactggctcggcggcagtggcggcacacgccacggccagcaccgatactgcaagtaccgtcatcgccctgcgcttgtcgcggaaactgtctgccgtcataccgtatccagcacctgcaccggaatggcccggcctgcccgctggcgcgatgccagtcatccctcccactatgcaatgaccatgctgtgccggcaatgaccggggcgctgacgcctttcgcgcgccgggtgctatcgttccgcccatcttccctgcgcaggagcgctgcatgtccgccttccgtctgtccctgttgctacccgcgtcggccctgctgctgtcggcctgcgtcagcacccccggtccgcaggtcaagggtaccggccactgcgacgccagccagctgggctgggcaatcggccagcctgccaatgagcccaacatccgccgcctgtccagcgaaagcggtgccggcctggtcaacccgatcggccccaacaccatcaccaccaaggacatccgccacgaccgcctgcgtgtgcacgtggacaaggacaacatcatcaccgccacccgctgcgagtaggcgctgtagagccgagcccatgcccggctgcgcttccgtgacagccgagcgcaggctcggctctacagctcagggctcggtataccccgcgcagtccggcagcgcctggtcggggtggaacaccccatcactgaagcggaacaaccgcgtgtagctgcacgccgggtcctgctcggtgcgcaggtccttcttcttcaacggccccttggccagcgaatcctcgaagcgtgagacaccggccgggaaccgcgtcgccaccgtatggtagcgcaacaccggcatgcccccggcggcggtatccagcgccagccttgccgagaaccgatactcgtcgtggcaggcgccagcgcgctgcttcatgtcctgctcgctgaaacaggcgcggatcatcgcgttgcccagccatggcagggtcagcacgtcgtcgtccacctggatgtcatcctgcaggtgacgcacgcgcgccagctgcagcgtggacgcgtcggcaccaccgcctgagtacatcgtgctgaatttgacgataccgcccaccagcacgttctggcgggcgcgctgccgcgggtcgctcaccgcctcatcgctgccaacgccaggcgcaagccgcacgatccacggccacagcgaaagctcgctttcctgcggcacgtcgatgctgacgtggtagacgtgcggctcgctttcgccagcctcccgttcagagacttccagcgtcgtcggccgatcgccgtcctcggccaccggctgcacacgcacgcaccaggcacgatcgagggtgcagtactgcatgcgtgcttcgccctgccctccctgttccagcacctgccccagcggctccatcacgttgccggcggcgtcgcgctgctgcggcaggatcgcggactgcgccagcaccagcagcggtgttgccagcaatgcagcgcacagggtcgcgcgggcaacgatggtgggcatgggcggctcctgcgtacgggattccgatggtaaccgctgtccgggtggggctgagccatgctcgacggctgtctgtcgggaagagcagccgagcatgggctcggctctacatcatccgcagtcgcagccaccccaccctttttccttcgaggtctggccgatgcccggattgaacgtattgctcgggtccagctgccgatagaacccggccagggccggcttggccgggtacaggtggccgacattgtgctcggccggatactcggcgccgcgctggtccagcagcgcccacatcgcgtgctcgatcgccatcgggtcttcgcccttgcgtgcgatgtagtcctggtggaacacatggcacaggaagtgcccgtaatacagcttgtgcagcaggcgtccatcgatatcggccggcaactgctcgaaccagtcggcatcatcgcggcgcagggcgatgtccagcgccacgatatcctgcacctggtcccgatgcacttcgcggtagcgcaccgccgcgccggccaccgcgaagcgatgcaggaacgccttgcgcccctcatcggccgtgcagtggaagtagccaccctcatgatcggcgaagaagccgcgcagccaggcctcggttgccgccgcgtcctgtgcggagaccttcagcaacaggtgatgctcgtagcgctggcggaattcacccatgcgcctgggcaggtgcgagggcagcaggccggtcagcatctgcatcacccggtcggttaccccgcgcaggcccagccgttcgaaccatccatcgacccggctcttcaatgcgaacgcggcgggcacacgggaagtgccgaggcggtcgatcaacaggaagctgtccttgccgtagcgctcgccgatgtcataggcatcgcggtggatgtactcgccggccatcggcaggcgctcgaagccggtcagcagctggcgtcggatcgcagtgaggctgtcggtgcggttgctgccgatgtagaagacctcggcgggctccttttcgaaggtatccaggcgcaccgcgaacaccgccagcttgccggccgaaccggccgcttcgaagtggcggctggggtcggcgttgaagcgtgccggcgtatcggcatcgacccggcgcacttcctcggcgtagcgtggatcagacgcggcgcggccatcgccgtcacccacgtcgtcagcggcatagtcaccggcctgcaggcgctgcaggatctgctcgggcgtatcacccagcgcgatgccgaggtggttgaccagctgcaactggccctgcgcatcgacctgcgcatacagcgccagctcggtataggccgggccacggcgcaccagcgcgccgccggagttgttgcagatgccgcccagcaccgaggcgccgatgcaggaggagccgatcaccgaatgcggttcgcggcccagcggtgccagggtctgctccaggcggtcgagcgtggcgccgggcaggcacagcacctggcggccctcgttcaacagctggatgccggtcaggcgcagcgtgctgaccagcacgatcgggcgcccatagtcgtccccatccggcgtcgagccaccggtcaggccggtattggccgcctgcaggatgatcgccgctccgccctgcaccgctgcctgcagcacataccacagttccagcaaggtacctgggcgcaccaccgccagcaccgggccatcgccgaagcggtagccacgacggaagcggcgcgtggccttgtcgccggtcaacacatggcggctgccgaccgcgtcgcgcaactgcgccagcacggcgtcatggccactcatggcaggttgaccagcgaatcgcggctgatgtcggcgatgcggcgcgcgccggtcagtgtcatcgccacgcgcatctccttggcgatcaggtccagcaggttggccacgccggcctcgccctgcgcggccagcgcatagacgaaggcgcgccccagcagcacggtatcggcccccagcgccagcatgcgcaccacgtccaggccggtacggatgcccgaatcggcgaggatcttcaggtcgccctgcaccgcatcggcgatggccggcaatgcacgtgcggtagacagcacgccatccagctggcgaccaccgtggttggaaaccacgatgccatcggcaccgaacctgaccgcatcgcgcgcatcatccgggtcgaggatgcccttgatcaccatcgggcccttccagaactcgcggatccactccaggtccttccacgaaatggacggatcgaagttgctgcccagccagccgatgtaatcctccagcccggtcgggttgccgcggtaggtggagatgttgcccaggtcatgcggacggccgaacaggccgacgtcccacgcccagtgcggatgggtgacggcctggccgatgcggcgcagcgaggcattcgggccgctcatgccggagtgtgcatcacggtagcgcgcgcccggcaccggcatgtccacggtgaacaccagcgtggtcacaccggcggcctgtgcccgctccagcgcattgcgcatgaagccacggtcgcgcagcacgtacagctggaaccacatcggccgctggatggccggtgccacttcctcgatcgggcacaccgatacggtggacagggtgaacgggatgccccggctgtcggccgcgcgcgccgcctgcacttcaccgcggcgggcatacatgccggtcaggccgaccggcgccagcgccaccggcattgccagcgtttcgccgaacagctcggtttccaggctcaggtcggacatgttgcgcaggatgcgctggcgcagcgcgatgtcggacaggtcggaaacgttgcgcttcagcgtgtgctcggcatacgcgccgccatcgatgtagtggaacaggaacggcggcagccggcgttgcgctgcggcacggtaatcggtggaggcggagatgatcatggggtcaaccgtgtggggaaggcaggcgcgaggcccgcgcacgccgggcttcgttgtcatcgagcgtgcgcagcgtggtgtgcacgaactcgaggtgggcatgcgcagcggcgcgcgcgcgttcggggtcgccggccagcaccgcatccatcatttcgcggtgctggtcggacaggggcgagaaggtcctcgccgaggtgtagagcttctcgcggctctgcgagatgttggtctgcagcagttcgaacaggccgcgcatcacctgcagcagcaccaggttgtgggaggcctcggcgatggacaggtggaaggccgcgtcagcctctgcttcaccggtggggtcgtccttgccgtgcgcgtccatcatggtctggaaggcctgcgcgatgcgcgtacggtcctcatcggtggctcgcagcgccgcatgccaggcagtggcaccttccagcgcgtggcggatctccagcacgtcaaaacggtattccgggtcgccctggaacagcggcaggtacggcgccagcggttcatccagcgcctgccgcgcgcgcgccgccggttcggccacgtaggtgccgccaccgatgcgtgcggtcagcaggccctggctggccagctgcgcgatggcctcgcgcagcgcggtgcgcgagacccccagctgcaccgccagggtgcgctcagcgggcaaccggtcgcccggccgcagccgctgttcctgcaccaggccgcgcagctgcgcggccaccctgtccgaaatacgttgcgtgctcatggcgccattgtggcccgaagcgcacagcgggtggtcggccagccatgcatggctcagggaatcatccaggtcagccagtaggcctgggccagggtgatcaggccgaccatcgtggtgaaaatcaggctgtgcttgacggtgaagcggaacaggtccgactccttgccggccaggccgaccgccgcgcaggcaatggcaatcgactgcggcgagatcatcttgccggtaacgccaccggtggtgttggccgccaccagcagcacgtcggatacgccgatctgctgcgcggtggtggcctgcagcgccgagaacagcgcattggacgaggtatccgaaccggtcaggaacacgcccagccagcccaggaacggcgagaagaacgggaacgcatcgccggtgtgcgccaatgccagcgccagtgttgccgacaggcccgagtagttggcgatgaaggcgaaggcgagcaccatgccgatcgagtagatcggcatgcgcagctcacccacggtttcgccgaaggtctgcagcgccgagcgggccggcatgcgcagtgcgatgatcgcgatcaccgccgcaaggatgatcgcggtgccggtggccgagaaccagtcgaatttgtagatcgcctcatagctgagcggcgcgtcgacgatcggcggcatcttctgcaccctctggtccaggcccggcaccgggagcttgagcacccagccttccaacgggccgcctgccgcgaacagcgacttgaacggcttgatgctccacagcgtgaccatcgcggtgaggatcaggaacggcgaccacgccttggcgatctggccgacgctgtagcgtggtgcctccagtgcctgcgcggccgcctcggcgctggtttcggtatcgaagcggaagatccgtgccggcttccagcggcgcaggaacagggtcaggcacaccagcgacgccagcgaggcggtgatgtccggcagctccgggccgatgaagttcgaggtgaggtactgcgcgatggcgaacgagccaccggccaccagcaccgccggccaggtttccctgatgccacgccagccatccatgatggccatgatccagaacagcacgatcacagtcaggaacggcagttggcggccggccatctggccgatctcgaatgcatccaggccggtgacctgcccggccacgatgatcggaatgcccatcgcaccgaacgccaccggcgcagtgttgacgatcaggcacaggccggcggcatacagcggtttgaagcccagcccgaccagcagcgccgccgtgatcgccaccggtgcaccgaagccggccgcgccttccaggaaggcaccaaacgcgaaaccgaccatcagcatctgcaggcgctggtcttcggtcaccgacaggatcgaggcgcggatgatgtcgaactgaccggtcttgaccgagaccttgtagaggaacaccgcgccgatgatgatccaggcgatcggccacaggccgtagacgaagccgaaaccggccgcgcccagcgcctggctcaacggcatgcggtagaacaacagggccacgccaagcgcgatggccacggtgatcgtgccggccagccagcccttcatgcgcagcaccgcaagggcaacgaagaagaacgcgatcggcagcagcgcgatcaggctggacaaccacaggttgccggcggggtcgtacaggtgttgccagggctgcatgaaggctctcgactggggcgggatgtgctccaccgcaggcggtgggtcgccgtggctgtcgattattggtcgtaccaataatgatttcgatcagaccacttgcagctgatttaaccgccgctccgacgaagtgcctattagaccatagggctagacttcatattggtccgaccattacggctctcatggtagtggcggccgctggccggcaactagaccttccctacggaatccttttctccaaccgccgcatcaccgccagcaccagcacgcacagcacgctcaccccgatggcgatcacgtacttgctgatccccaccgcaatcccgatggccgctgccatgatcagcgagctggccgtggtcaggccgctgacctggtcctcgcgtgacccacgcaggatggtgccagcggcaacgaagccgacacaggccaccaccgcttcgatcaggcgcaccggatcgacctgcagcaggtcgcggtagcgctcctgctggaaatgctcggccaccgagtcgccgaggccgacgatcagcgcagcggcccccgcgatcagcatgtgcgtacgcaggccagcggcgtgcttgcccatctcgcgctcgacgccgagcacgccgccgaacagcatcgctgcggcaacgcgcagcaggatcgagacatcctgggtgagttccatggtcaagctccggggttttcccggagcgtcgcgtggcccccgtggcacagaggtgaaggccacgccacagtccgttcacccggtagcgccgggcgacacccggcggcaccgcaccctgcgttcaacgcatcactgcgccaggtagccaccatcgatggcgtagtacgcgccggtcgcaaacgaggcgtcgtcgctggccaaccaggccaccaatgccgccacttcctcggccgtgcccagccgcttcagcgcgtgccgtccttccagcgtggcgcgcaccttcgggtccatcttctccagcagcggtgtgctgatgaaacccggacccaccgcgttgacacggatgccgtcggccgcatgttcccacgcggcggtctgggtcagcccgaccacgccgtgcttggccgccgcataagcggtggaaccggcatagcccacctggcccaggatcgaggccatgttgatgatgctgccgccggttccagcggcccgcattgcctggatctgcgcccgctggcacaggaacacactggtgaggttgacgtcgatgacccgctgccagccctcgatcggatagtcgccgctgctggccgccggcccgccgataccggcgttgttgaccgccacatgcaggccgtcaagttccttgaccgtgcgctgcaccgccgcctccaccgctgcatcgtcggtgacgtccagcgcgatgccgatggcctgtgcgccggtgctgcgcaactgcgccacggtggcatccaccgcatcctgcttgaggtcccagaccgaaatacgggcaccggatgcggccagcgtctgtgccacggccaggccgatgcccgacacgccgccggtcacgatcgcggtcttgccggtcagctggtaatcaatcatctgcattctccatcggtgggggtagcgatgcggcgcgcggccgccaatccatcaccttacgccggccgctgtgacgagcagaccaacagcctgtccgcggatgatcgttccagcaatgaaacctcaaccgaagttcatgtaaggaatcaagtacggatatagcggcaaaacgctggcgtatgtccggcaccccgttcaacttggccgtaatgaccaatcggtttgaccgtattcaaatcccctgcgaattattcgcagcgacaatgggaaacgtttccagtttcttcgacacattttttccaacctggcgttttccggccttccaggctgcccgctacgcggggcagcacatgggccatggtgccagcgcctcccctcctgtacgtgccgagcgatgtcccgatacttcacctttgccgattaccgccgcttcggccaacgccacggcttcgattaccgcgctgatccggaacacctgcgtgacgaccagtgggccggccgcggcgaagtcaacgaacagttcatgcgcggtggcatgagcctgatcgcctccgacgtgcataaccggttcccctatgtggcgaccgcgcaacagcggcccgggctcgccatccgcgtgatgctgcagggtcaggtcgacgtgcgtatcccgcgacgcggaagtttcaccctgcgtgccggcaccgcgatgaccgcccaccatcgcgaccagatcgagatgaccggcgcgcaccccggcgaaacgcgcctgcgcggggtcagcgtgatcgtgccgggtggcatcgacgcggatgttttccagatgccacagctggaaaaagcgcttggcacgcacctggaatgccgccactgggccattccccacgccatgctgccggtgctgggccagttgttcgacagcccgtggcaggacggcatcgacgcgctgtggcgcgaaggcgtggcattgcagctgctggccctcggcctgcaggccgaggatctgcagaccgacccggtgcgcacgctgcgtgccggccagcgcgagcgcctggaacgggtacgcagttacctgcatgacgaccccggccatgcacacagcctggtcgagctggcccggctggcctgcatgagccccagctcattgcgccgccattttgcccagcagtatggaagttcggtgttcgactacctgcatgaacagcgcatgcgccatgccgaacagggcctgcgcgaaaacggatggacggttgagcaggccgccgccgccagcggctaccgccaccccagcaacttcgccgccgcgttccgcaagcgcttcggcctggtccccagccgctggcgtacgggcccctcgaaggtggggtgaggatccccgctccggtaggtgtcgaccttggtcgacacgctctcgcgccgtcgcggatgccggccagcggccggcactaccgccgccgggcatcgcgcacccggcgtacctcatcaacctcaatacaccggcagatcgatgtaactggcctgcgctgcgctgtgccagacccgctgcgtggccttctggtaatcgcccggcttggccaggtagatgttcggcacgtacgtctgcggattgcggtcatacagggggaacaggctggactgcacctgcaccatcacccgatggcccttctggaaggtgtggttggcgttgggcaggtcgaagcggtacggcagcacctggttggcggccagcggcttcggatcgctgaagctttcgcggtaacggccacggaagatcgccagcgacaccggcagctcgtagccacccatctccggcgtcgacgcttcctggtccggatacacgtcgatcagcttcaccacccagtcgctgtcggtgccacttgtcgaggcctgcaggtgaaccaccggtgcgccgccgatgcgcagcggcgcggtcagcggttcggtgatgaaggtcaacacgtccgggcggccatcgacgaagcgctggtccttcaccagccaggtggtccacatgtcgcggtcgccgaagcggaccgggcgcggcacgaacggtaccggcttggccgggtcggacacgtattcctcgaagtccccctcgcccgccgccggtgcctggaacgccagcttgccgccggcgcgcaggtacagcggcttgctgctggcggcacagcccttgtcgcagctgcgcggccaacccttcaggcggtcccagtggttttcgccggtgttgtagatcagcaccggcggcgtatcggccgtcggcgcgccatccaccaggtactggtcgaagaacggcttgagcacatcgcgacggaactgcagcgcggtatcgccatcgaacttcagcgcacccagctcgctgccgccgtagttcacctggctgtgccgccacgggcccatcaccagatagttgcggttgttgccgctgtcgcgcccttccatcgcctggtaggcgtggttggcaccccacatgtcttcctggtcccacaggccctgcagccacatggtcggcaccttcaacggtgtcttggccatcaccgcgtccagcgcctggccctgccagaagccatcataggccgggtgctcgaccagcttcttccaccaggtcagctggtccacgccggtgaaacgcgcgtagtcaccggccgaaccgaggcgcaggaaggtgctgtagtcgtcatagccgaggctgggcagcggcgtgcccttgccgcgcttctcggtctgcattgcgaaatagttgaagttgacctggcggaacgcaccgtagttgagccagtcgtcacccatccagccatcgaccatcgggctctgcggcgcggccaccttcagtgccgggtgcgggtcggtcagcgccatcaccacggtgaaaccctcgtacgacgagccgagcatgccgaccttgccgttactctccggcacgttcttcaccagccagtcgatggtgtcccaggcgtcggttgagtgatccaccctggtgttgttcaacggcccgcgcagcggccgggtcatcacgtaatcgccttcggagccgtacttgccacggatgtcctggaacacgcggatgtagccgccgtcgacgaacacctcgtcgccctgtggcagcaggtcgcgcatgcgcggcgagtcactgcggttggcacggccagcagcgtcgtagggggtgcgggtcagcaggatcggggcattgcgggcacccttgggcaccacgatcaccgtatacagcttggtgccatcacgcatcggcaccatcaccacgcgcttgtcgtagtcacgaccgacatcgggggcaacgaagggcttgccgctgatgtccggggtcatcggcggggtatcggcggccagcacggcgctggacaggcaaagggcaatggctacagcgacggcacgcacacgcatggacaacccctcccggcaggaaagctccaagcctactcctgccccgagccatgaagtgtgtgcgggctttgcattctgcggtggatgcaggcaggactgatggcacatgtgcctgccaatgtgggagcagtgcgtcctgtagagccgagcccacgctcggctcagaccgccgcgacctacccgaagagcagccgagcgtaggctcggctctacaacatcaggctaccggcacttcatgcagggccagccagcgccagcgcccggtttcctgccgcagcaccgccagtgactcccgccatgcaggcgtgccgccatcgagcgaatgcccttcgcgatagcgcagcaccgccagcggtgaaggcgcttccaccgcgtgcacggcgtcgatggaaatccgcagcccggggcgcgccccgtgaccgcccgcgaacaacgcctgcacggcttgccgatccaatcggcgacccgcgatgccgaccatgctgaagtccgcgctgaagtgcgccatcagatcctccagcgcatcggcgccgacatcggcacggaaccaggcctgcagcttgtcgtgcaggtggtggatttcatgttctgcggtggtatccatcagatgttctccggttgcgaaagggtgagcaactgcggccggcgcagcagcgccatcggcagcagggtcagtaccgcggccagacccagcgccatgccggtgccgtgggccggcagccattgcatggccaatgccagcagcagcgcgatggccgcggtgcccaggcagaagctgagctggcggttgaggttccagagtgcactggcatcgcccaatgcttcgccctcgaccccatggaaggccagcgtctgcgcggtgctgctgcacaggctgccgccggcgcccatcagcgcgaacagcagcccggccaacgcgaaggccggctgcggcagcagcgccatcaacagcaggccgctggcctgcaggagcatgcccgtacgcagtaccgtggccgggccgaagcgcgccagcaggcgcttgctggccgtgatcgcaatggccgaggccagcgcccagggcagcatcaacgcgccgatgcgtgccgcgctgtaaccggcctggtgcagctgcagggtactgaccagctggctgccgatgaacacaccgggcactgccagatagaccagcatcgccaggcgcaggccccgatgggacagcagcgaccagcgcagcaggggctgcgcctgctgccgtgcatgccgcaggtgggccgccgccaacagcattgcgatcaacagcagtacggcaccggcggcccgatggccgggttcacccagccaggtcaacgccagcagcagcgcgcccagcgccagcatcgcggtggacagcgcataggcctgcaggcgcggcgcactgcgcgcgccaccggccggcatccaggccagcactaggctgatcgccaccaccgccaacggcaggctggcccagagcacgccgcgccaggacaaccactgcaccagcaacccgcccagcgccggcgccagtgcgggcaccagcagcgccaccagcaggatgcggcgggtcagcgcgccacgctggtccggcgtgcactgtcggtacgctgccgcctgtgccaccggaatcagcaggccaccggccagcccctgcagcaggcgccagcccagcagccagccgatacccggtgcggcgccggccagcacagcggcaaccgcgaacaacagcaacgccaccagcagcaggcgacgctcaccacagcgcgcggccaaccagggcgccagcggaatcaccacgctcaggcccagcatgtaggcggtgcccacccaggccagggtaccgacatcagcgtgcagttccgctgccagtgccggataggccaccgtggcgatgaacatgttgaccagatccagggcgaacaccagcaggaagatcgcctcatggcgcaggcggggggacggcatcggcggtgctccagcagagagaccgccagcatgccgcccgggagatgttggaaaaacacgacatcacctgcaacactgtcaaatctgttttgacaatgaaccgccatggtcagtctcgatcgcttcgatatcttccgtgccgtggtcgaggccggcagcctgaccgcagcggccgatcggctcggcctgagccgtgcggtggtcagcttcaacctgaaacggctggagcaggagctgggcgtgaccctgctgctgcgcagtacccgccacctggccctgaccgacgctggcgaacagttcctgcagcactgcgtacaggcgctggatgccgcgcaggcggcaatcgatgccgcgcggcgcgaccagcaccagctgcagggtgtgctgcgcctgaccaccaccccggagtacgcgcagcttcgcctgattcccgcactggaagccttccgtgcgcggcatccggccctgcagctgcatctgtccacgtctcccgcgccggcagacctgattcccgagcgcttcgacctggcgatccgtctcggccgtctgcccgattcgggcctgcatgccagtgaactggaacggcacccgctgtgcgcggtggcggctccgtccctgctggcacgcctgccctctgccgatgcggccaatgaccccgtgcaactgggcaccctgccccgcctgggttacccgcgcctggccgacgtgccggtggtcgcgcccgacggcagcgacgccttgtttgccaccaatccgggcaatgcagtggtgcgcgtggatggtgccagcagcctgcgcgccttcgccgtggccggcgccggggtcaccgtgctgccacgctggctgatcgaggacgacctggcccaggaccgcctgcgcccggtgctgcgccagcaccgcttcccgcagcagagcgtgtacgcggtctacccgcacagcacgcagccctcgccgaaggtgcggcagctgatcgatttcctgcgcgggtggttcgccatatgaaaaggggacggaggggattaagtcgtttatgcataaacgacttaatcccctccgtcccctttttcaggcacggcccttgcgggccgtgccttcaagcctcagcgcagcacctgctccaccagctgcacgtccaccgtctgcagcggttcggcggcgttgcgcgacagctgcacctggtaggtgccgccatcgatcttccactggcgcgcctgtgcatcgtagtgggccagcgtcttcggctcggcttcgatgcggatgcggcgctgttcgcccggctgcagggtcaccttgtcatagccgatcaggcggatcggcgtggtgctgccggccggcagcttcaggtacagctgggccacgtcggcaccggcgcgcttgccggtgttgcggatgtcgacgctggcgaccaggcgcgaaccttccacgctcaccttcaggttgtcataggcgaacgaggtgtaggacaggccatggccaaaggcgaaggtcggggtcaggcccttggccgccatccacttgtagccgacgttggcgccttcgatatcgaaatcgaacacatcaccgaacggcttggccggcttgaagccgaggccgtcgatgtgcgggcgcggcagctgcgattcgtccgtcacccaggtcaccggcaggcggccggacggattgacctggccggtcagcagtgcggcaatgccttcgccaccgcggatgcccgggtaccaggcctgcagcatcgccggcacctgcgccagccacggtgtgcgcaccgggccgttggtttccagcaccagcacggtcttcgggttggccttggccactgccgagatcagggcatcctggttgtccggcagctgcatgtccggcaggtccaccgattcggcagcccactgcgtggcaaacacgatggccacatccgcctgcgcggccgccttggccgcagcagcggcgttggtgccatccacatacgtgatagtcgcgtccgggcgcgccgcacgcagcgattccagcggcgaggacggatggaagatcaccgggcccggccaggtggtcggcatcacgccgggcaccgcgttggtgcccttggcggtcacgcccaccatcgatgaaccaccgccaccgatcacgcccttgtcggcatggccgccgatgatgacgatgcgcttcacgctgtcggccagcggcaacaggttgccctcattgcgcagcagcacgctgccctcctccaccgtgcgctgggcaacggcgaagccggcctcggcatccaccttctggtgctgcggcgggttgtcgaagttgccatgcaggaacatcgtgcgcaggatgcgcgccaccatgtcgttcaggcgcgcctgcggcaccacgccgccatgcacggccaggcgcagcggttcatcgaagaacaccgccgcgtcgaacacctcaccggccgactgctggtccaggccggccagcgcagccttcgagccactgtgcacgccaccccagtcggacatcacgaaaccggggaacttccattcctgcttcagcacctggttcatcaggtagccgttctcgcagccgtaggtgccgttgatcttgttgtacgagcacatcgccacgcccgggcgaccggcatccagcgcgatctcgaaggccaacaggtccgactcgtgcatggcctgttcgccgatgcgcacgtcgtggaagttgcgacgggtctccatgtcgttcagcgcgaagtgcttcatcgaggagatcacgtgctggctctgcacgccctggatcagcgcgccaaccatcgagccggccagcagcgggtcttcgccggcgtactcgaagttgcggccgttgcgcgggtcacgctgcaggttgacgctgcccgacagcaggatattgaagcgctgctgccacgcctcgcggcccatcgtggcgccaccggcgaaggcaacttcgcggttccagctcgatgcggtggacgggcccgatggcatcgccgtggcgaagtcgcccgggcggatgccccccggattggtcacgccgacaccggcatcggccgactgctgcgacgggatgcccagccgcggtacgcccggcacgaagccggccgaaccgaccgcaccttccggcagcgggccgccgtccttgcccagcccgaagtagctgtgcagcatctggaacttctcatcctcggtcatcgcctttagcagcagcgcagcgcgcgcatcggcgttgagcgtggtgtccatccacggcgtgtcgccgtgcttgtcggcggcataggccagggtcagcagggtggcacgcagcgtgctgccttccaccttgaacggcgcgctgctggcggcctggaagccgtcgctgaaatagctggcatccgcttccagcgccacacgcgccggatcgaagcctgcggccttggccgattcaccggccaccgcgccgagcagcaccgccggtgcacccagccgcgaacgggtgaccagcgccggcagctgcgccgcacctgcaccggcatcggtatagaccgccacagtgtggcggccgtcgtccaagcgcaggtagttcaggcccggttggtcggggccggattcagcggcgatcggcagccgggtcagaacagcctggccgcgctgggtctggccgtcgtccttgccggcggcaatgaagcggtactcgtagcccaggccatcggccagcacctgcagcggatcgacctggccgatgccgcgctgcacctggcgcacgctcaccgcgtccaccttcaggctcttcagttgcgcggccagggccggcatcgcctcggcgtggggcgcctgttccagggtcagcacagtgaacgcggccgggtcggcccaggccggagcggccagtgcggcagacagggccagagacagtgcaagcggttttgtaaacgttttcatcggcaggcgtaattccgttgccaaggcaatcggtccagggaaagtgccgccgaagggtgcagcgttcatgccgcgcaggggttgccaggcaacgccccacaggccgatggacgggccggtctgcgcgcgggaccctcctcccggcgtgacaacctgcctgcccgggccgcgcagggcgacccaatcctgtgaagattgtgcgagggcgttcacacctgtcaacaggacctaagtcacaggggcaacccggccaatggttatcaggccatcactggcggtcatcagcgcgccgcgcgaggctgctgataatggagatccctggccacgaatcgagcccatgaccgtacatcgcgacttcgatcatctctggcgcgaccgctgtgacacctccagccagcgcgcaccgcgcgtgctgatccgggtgttcgtggccccgggcgagctggagcgcagcgtggcgttctacgagcagttgcagggcgtggtagccgatgcggggttcccgttcccggaagccgggctgcgcctggcgatggtcggcgccttcctgctgatcgaaggcagccaggcggcactggccccgttcacctcgaccacggggacactgctggtcgatgacgttcggccctatcacgacaaactggtcgccgccggcgccgagatcatcttcccgctgcaggtagtcccgaccggggcggcgttcaatgcggtgcatcccgatggcaccgtggttgaatatgtgcatcaccggccggatccgcacgggcgctgagggggcgcacggccgggcggcgcacggcacccgcggtaggcaacctcagaagcaacagccgaagcaaaagcgggcttcctgtgggttggcggggtagggccggttgcgttgacgccgtgcaatccgtctgtcgaaataatcgatttcgattgagattcatccacgcatggcgtggatctacaatccctcaatgtcctcccccaccctgccctggaatggcacgttgctgctggatgctcacgtggccgtgctgcagggtcatgccggtgacagcgccgcgcacgcgcactacgcccatcaactgctgctcagcgacggcgcagcctggcaggtcgaggtcgatggcgtgcagcagcaaggccagcgactgtggctgccatcattccagccgcacgcgatcctgttagcgccagaagcaggctgcacggtgtttcttgagccgacgcatgccaatcccgcacagatccagcaatacctgcacgcactgccgggcaacgcgctggaactgcacggctggctgccacggctgagccgcccgcaaccgctggaccgccgcgtgcaggcggcattggcccgtatcgcccagcacctgcccggcccggtgccggccgccgatatcgccggggcggcgcacctgtcgaccagccagctgcaccggcgtttccagtctgatctggcggtgaccctgcgcggctgggtgctgtggcagcggctgcgccgcgcactcatgcatcatctgcgcgggcacaccctgaccgacagtgcgcatgccgctggattcgccgatctggcccatctgtcgcgcagcctgcgccgcatgttcggtatcggtgccgcgcagctgcagggcctgcagcttcacgcggcctgacacggcccatcatccgcgcctgcgcagaccttccggcagctccggcacctcgccatgcggcagttcgcggaacggcgccagcagctgtcccggataatcgcgcggatagtccggttggctgccgatgccgaggtcgcgctgctgcagccgatagcccggcgcatcgaaggcggtccccagcaggtgatcccagacggtcaggaacaggccgaagttgacgtcgccagcggtgccgtaacgcatgtggtggaagcggtgcagcggcgcccacgccatcacccggcccagcaggcccgggcgcatgtccacgttggagtgctgcagcagcagctggatggcaatggcgaaggccagcaccgcagccaccggcatcggcaggcccaacagcagcagcggcagtacgccgcccactgcttcggccgcctggtgcaacggatgcttcatcaagccgttgaagccgtacatgcgggtgaagctgtgatgcaccgcgtgcaaccgccacagccagccgatgcgatggctggcgtagtgcaccagggtaatgccaaggtcggcgcagacgatggccagcagtacctgcagaacgaacggccactgcagcggccacagctgccacggaaggagcgctgccagcagcggcaccgcagcgatcgacagcaggttcaggctttcgttgaccagtgcatgcagggtgtcacgcagactgtcgccgtggtcgtggttgaacgcggggtcatacggccaggcacgttcggcagcgaacgaaaccgcgatggcgaccgccagcaaggccagcagccatagcggatcgccatggaggtggccgacccagacgacggcggcggcaacgaaaccgagcaggaacaacggggcatacaggcggaggatccagtgtttcatgggcaacccggaacgtgaggggcctgcatgctggcgcggcacgacggttgcgggcttgaacaaacggcgcaacccgccccgcctcggtggatatccccctttggccgacaccgcgtttcccccacccacggatggcgtggatctacaatggcgccctcatcgcgcccggtaccggcatggattccttcaacctgatgcgcgccttccgccgcatcgtcgaacgcggcgggctggcccgcgctgccgaagacctgggcatgtcgccggccgggctgagcaagcagttgcgcgcgctggaaacgcacctgggcgtggtgctgctgcagcggaccacgcggcgcatgagcctgaccgagaccggccacgcctattaccgcgaatgctgccgcctgctcgacgaattggacgcattggaacgtggcatcgccgaacagcgtggcgaggtggccgggcgcctgcgtgtcaatgcaccgcagtcgttcgcactgagcacgctgtcgccgctgctgccacgcttcctgcaacagcatccacagctgtcgctggacctggtgatggaagatcgcctgctcgatgcggtcggtgagggtttcgatgtgtcgttgcggctgcgtgccgagctggacgactcgcgactggtggcgcgccggcttgcctcgctgcaacaggtgctgtgcgctgccccgtcctacctgcggcagcgtccagcaccgcagtcggtggacgatctgcaggtgcacagtgtgctggcctacagcctgtccgactcccccggcagctggccgctgctcggcccggatgggcaggtgaccatcaccctgccggcacgcgtcaccgtcaacaacagcctgctgctgcgcgacctgctggtggccggcatgggcatcggcgccctgccctcgttcctggcggcaccagcgctggcccgtggcgaactccaacaggtgctgcccgaccaccgctatccgccacgcttcgtgcatgcggtctatcccacgtcgcgccacctgcaacccaaggtgcgtgccttcatcgatttcctgcacgccgagctgccccgctgcgccggcctggattcgtaaccgccagcgaaaactgagctgcccacggcgcgctgtttcggccccgccgcgctgcctaatctgccgcctcccctctcaccgatggcaggcagatgtctcccgttccttcccccgccaccgccgcgccggtggtcgacttcttccacgacgtggtctgcggctggtgcttcgtgctggccccgcgcctgcagcaggtctcggccgaactcggcatccaggtgcgccatcgcagcttcgtgctgcaggactcgcgcgcgcagatggtcgaggtgttcggctcgatggagcgcgccaaggcgatcatcctgcgccactggaccgactgcgccgcgcatgaagacagcgcgcgcatcgatatcgaaggcatgcgcgcacaggacttcgaatatccctccggctggctcggcgcactggcctgccaggccgcagggttgatcggcggcaatgatgcccatggcgcaatgttcgacgcggtgcaatgggcgcacctgcaccagcaccgcaacatcggcgacgccgaagtgctgctggatatcgccgaatcactgggccatccccgtggtgccttcgctgaccacatgcgcagcgacgcagtacgccagcgcgtgcaggccgatcgtgccgacgccgctgccctcggcatccgctccattcccaccgtgatcggcggcaacggcctgcgcctgcagaccctgccgctgccgcaactgcgccaggccctggcgcccctggtcgcggcctgagccgcaccctccccaccctgcaaggagattcccccatgaccccacgtatcctggccagcgcgctggccctgctgctggccggcaccgcggcgtccaccaccgtgtccgcgcacgaacgcgttccctccggccagcaggtcggcaccagcccctgggggccgaaggacgagatcggccggctcaacctgatcaccgaagcctcgcgtgcggcgatcctgtcgcgggtcagcggcggcaaggcctatgacctggccaccgactactacgtcggcatgcccagctggcaggacgccggcgacccgcactaccagttctggatgacccacaccccgcgcggcacggtgatggacgacccgatgggcgtgggcgagaccatgaacctcacccgcagctacaccggcaccgcgttctcgatgtacagccacaccggcacccacatcgatgcgctgaaccacttcggcatccacggaaagatctggaacggcttcgaggccgacaagcatctcggcgatcgtggctggaatgtcaccggcatcgagaaattcccgccgctgatcgcgcgtggcgtactgatcgacgtggccgccgccaagggcgtggacatgctgccggacagctaccgcgtcacccgccaggacctgaaggatgcgctggcacgccagcgggtgaagctgcagcagggcgacgtggtgctgatccgcaccggccgcatgcgcctgttcgaacagcccaaggcctacatgaccaacccgccgggcatgggcctggacgcggcgcgcttcctggttgaggacagcggcgcgatgatcgtcggcgccgacaacctgagcttcgagaccttcccctcggaggtggccgacgactacgtgccgctgcacacctacctgctggcccagcagggcgcgccgatcatcgaactggtggcgctggatgaactggcccgcgacaaggtctacgagttcgccttcatcggcggcccgctgaagatccgcggcggcgatgccgcgccgctgcgcccggtcgcgctgccggtccgcccgtaaccgggccctgtgggtgccgacctggctcggcactcctttcccacttcagcaacctgaaacccggcccgccaatttcattagtaattctactcacaaggcgagtagcatgtctggtctcagcccctgataccagcccgccgatactcgctccatgcctgtcgtttccgcccattcctgccgcttccagcccgcccggcgcctcccttggaggaccggctgatgggcgccgtcgtcgccctcgaccggctgctggacggccgccagttgtggcgcggcccggcccgccaggggccggccagcgaccacctggccagcggtcacccggcgctggacgcacgcctgcccggcggcggctggccggccagcgggctgtgcgaggtgctgcaggcggcgccgggcgttggcgaactggccctggtctggccggcgctggccaggctgagccagcgcgaccgcccgatcgtgctggtcgccccaccctatcgcccgcatgccccggcctgggccgcggccgggctggatctggcccagctgcagatcatccacgctgcgccgaagcaggcgctgtgggcggccgaacaatgcctgcgctctgccgcctgcgcggcggtgctgtgctggccgcaccaggccgacgatcgcgccctgcgccggctgcaggtcgccgccgacagcggccagtgcctgggcttcgtgttccgcgaggcgcaggcagcgcgcaacccctccccggccagcctgcgcctgcagctcgaccacggccaggtaagggtgctgaagtgccgtggcggcctgccacccgcgcagccgttgccactggccatcacccactgaggccgcgccatgcactgggcctgcctgttgttgccgcagctggcgctggacagcgtgctgcgcctgcagccggacccccagcggccactggtgctgctgcagggcccagcgcagcgccgcgtgctgcgtgcggtcagcccggccgcgcgcgcagcagggctgcgcccgggcatgctgctgtcggccgcgcaggtgctggtgcaggacatgcacctgcacgactacgaccctgacgcggaacagcacacccggcagctgctggccagctgggcctacgcctacagctcgcaggtcagcctcgatttcccgcatgcactggtgctggaaatcggcgccagccgtgccctgttcggtgactggctgacgatcgaaaagcgcctgcgcaacgaactgcatgaactcggtttccgccaccgcctggtggccgcccccacggcacatgccgcgcgcgtgctggccaacgtccacgacggcctcggcatcgatgcgcagcagctgccagcggcactggcgcagctacccttgccgcgctgcggcctgcccagcgacgcggtgaccgtgctcggccgttccggcctgcgcacgctgggtgcggtgctcgagctgccgcgtgacagcctggcccggcgcttcgcaccggaggtactgcagcagctggatgcactgcgcggcctgcccaccgcgccgctgcgctactaccagccaccggaccgtttcgatgcgcgcatcgaattcgaatacgagatcgaatccagccaggccctgctgttcccgctgcgccgcctgctgctggacctggccgccttcctgtgttcgcgcgatggcggcgtgcagcgcttcaacctgcatttcgagcacgacctgctgccggccagcgtgctgaccatcggcctgctggcccccgaacgcgatcctgcgctgctgttcgagatcgcacgcaaccgcatggaagcgttcgccctgccggccggcagccgcgcactgcgcctgcaggccgagcagctgccaccgttcgtgcccgccgcgcgtgacctgttcgatacccggccggcgcaggcgatgccctggaaccagctgcgcgagcgcctgcgtgcgcggctgggtgatgacgccgtgcagccgctggcggtgcaggccgaccatcgccccgaacgcgccagtggcacccagccaccggccaagcccccgtcgtactggccactgcgccccggctggttgctggacaccccacaaccgttgcgtgacccgcgcctgcgcatcgtcgccgggccggagcggatcgaatcgggctggtgggaccaggccgacgcacgccgcgactactacgtggtggaaaccgcacacggccagcgcggctgggccttccgtgagcgcaacgatccgcatgcgccgtggatgctgcacggctggttcggctgagccgccatgcacagcgaactgcccggctacgccgaactgcactgcctgtcggccttcagtttccagcgcggtgcttcgatcgccgaagaactgttcgcgcgcgccgctggccagggttaccgggcactggcgatcaccgacgaatgctcgctggccggcatcgtgcgcgcctggcaggcggcgaaggcgcatggcgtggcgctgatcgtcggcgccgaattccaggtcgaggacggcccgaagctggccctgctgtgcaccgaccaggccgcctatgccgggctctgccagttgatcaccacctgccggcggcgcgcagccaagggcgagtaccgctgcctgcgcgaggacctgctcggcctgcccgacggcctgctgtgcctgtggctggaccggcaaccggccgccaccgacctggaactactgcgcgccggcttcaatgatcggctgtggttggcggtggagctgcaccacgaacacgacgacgcacgccgcctgcagcagctgcaggccttcggccaacgccaccgcctgccgctggtcgccagtggcgacgtgcacatgcacgtgcgccgccgccgcgccctgcaggacaccctgaccgcgatccgccaccgctgcagcgtggccgaggctggctggcgcctgttccccaacggcgagcgccatctgcgtccgcgcaccgcgctggcccaactgtatccgcccgaattgctggccgagaccctgcgcatcgccgagcgctgccacttcaccctggaacagctgcagtacacctacccacgcgagctggtgcccgaggggcatgacccggacagctggctgcgcgtgctggtcgagcgtggcatcccctggcgctggaaaggcggcatcgaaccgaaacaacgcgagcagatcgaacacgaactggcgttgatcaagcagaagaactacgcctcgtacttcctcaccgtgcaggacatcgtgcgcttcgcgcgcagccaggacatcctctgccagggccgcggctcggcggccaactccgcggtgtgcttcgtgctgggcgtgaccgagatcgacccggcacgcagcaacctgctgttcgagcgcttcatctccgccgagcgcgacgagccaccggatatcgacatcgatttcgagcacgagcgccgcgaggaagtgctgcagtacgtgttcaagcgctatggccgcgagcgcgccgcactgaccgcggtggcaatcagctaccgtggccgcagcgcgatccgcgacgtggcgcgtgcacttggcctgccgatggaccaggtcaacgaactgggcgcagcgatggaccactggggcggcaacatcccattgccggaaaccctgcgcgagcgcggtttcgatccggacacgcccttgatgcggcgcctgctggcgctgaccgccgagctgatcgacttcccgcgccacctgtcgcagcaccccggcggtttcgtgatttccgaacatcccctgtcgaccctggtgccggtggaaaacgcggcgatggccgaccgcaccgtcatccaatgggacaaggacgatctggatgccaccggcctgatgaaggtcgactgcctggcgctgggcatgcttaccgccatccgcaagtgcctggccatgctgaaacagcatggcctgcatgaaggacgcatggatgcgatcccgcccaaggatgcaaagaccttcgacatgatctgcgccgccgacaccatcggcgtgttccagatcgaatcgcgcgcacagatggcgatgctgccgcgcatgcagccacgcacgttctatgacctggtgatcgaggtggcgatcgtgcgccctggcccgatccagggcgacatggtgcacccctatctggagcggcgccggatcctgcgcgaacagggaccgggcgcgttgaacgacccggacaacccgctctacccaccgcagctggaacgcgtgttcgcacgcacgctgggcgtgccattgttccaggaacaggtgatgcagctggcggtcgaagcagccggttacacgcctggccaggccgatgccctgcgccgttcgatggcggcctggaaacgccgtggcggcttggaaccgcatcgtgaaaaactgctggcaggcatgttgaaaaacggcttcagccgcgaatacggtgagcacctgttcgagcagatcaaggggttcggtgattacggtttcccggaaagccacgccgccagcttcgccctgctgacctataacagctgctggctgaaatgccaccacccggccgcattcactgccagcctgatcaacagccagccactgggtttctacagccccgaccagctgctgcaggacgcgcgccggcatggcatccgcgtgcttcccgtggacgtgcgccacagcgactgggactgcacgctggatttcagcaggggcgcggccgcgatccggctcggcctgcgcctcgtcgacggctgcaatgaagcggctgtacaggccatcatgcgcgaacgtgcacggcgcccgttcgacgatgtgggcgacctgtgccagcgcaccgcactggatcgccgccagcagggcctgctggccgatgccggtgcgctgcgcgggctcagcggccatcgccatcgtgcacgctgggatatctccggcgtggagaaccggctgccgctgttcgaccaggcccgcgccaccgctgaagcacgcgtgccgctgcccctgcccagcgcctgggaggacatgcaggccgattaccgcagcatcggcaccaccctcggccgccacccgatctcgttcctgcgcacgcagctgcgcagccgcggctgcctggatgccgcgcagcttgcgggccacggccatggccgtcgcgtgcgcatcgccggcctggtccgcatgcgccagcgcccgcagaccgccagtggcgttaccttcctcacccttgaagacgagaccggcatggtcaatgccgtggtctggcggcacctggccgatcgccagcaccgggtcctggtcgatactcggctgatgcagatcgacggccgcctggaacgcgtcgatggcgtgcagcatgtcatcgtgcagcgcatgcactgcctggatgaactgttgcaggggttgcgcagccacagccgcgatttccattgacgatacacagcgtcacacaatgaactggccatcggtcgcccgcatccgctatcgtcgctgcatccaaggaaggacgacacgatgccgcgcgcactgctgctgaccacgctggtggtctccacactcgccctgctggtttccggctggaccgcctggagcctgcatcgcagccaatcgccacagcgcatcatcgaagcgcgcgggctggtcatccacgatggcacgggccaaccccgggtgatcctaggcgcgccggtgcccgaccctctcagccggggccgtatccaggggccgcgcgccaccgccctgtccggcctgatcctgctcggcccggatggctccgaacgcgggggctatggcaccagcgatcgcggcggtgaagccgtgctgaccctggacgatgccaatggcaccacggaagtgttcaaggtggtggccaacccggaccgtggtgccagcctgatggtcaagcaccagaacaacaccggcgccatgctcacctcatggcagggcaagccggaactgatgttcgtcgatgacagcggccagtcctactacgtgcgcccgggcgccaacgccgcgccctgatctgcttctgtagcgtcgagccatgctcgactgcttctaccaacagcagccgagcatggctcggctctgcaacgtcgagcatcgctcgacgctacagaccgcacaccgccgccaggtcgtcagccagcggccgcagttgcgccgcgcccagcgccgcgcaggtgatgcgcaggccatgtgccggcgccgccaccgcgaacacctcgccagcgcgcacatgccatccgcgcgcggccagcgccagcacctgcggatggctgtcgcccggcaacggcagccacaggttcaatccctccatcggcagcggcgtcggcacgccacgcgcgcgcagcagttcctgcagcgactgcaggcgctgctggtaacgctcgcctgccgaggcgatcttcgcccgctgcgttgacgacgccagcaccgaggttgccgcgtcctgcagcaggtgactgacccagccgataccggatgccaatcgcagccgcaaccgcatcgcggtttcttcatcgcaggccagccaggccagccgcaggtcggggccgagcggtttggacaacgaacgcagcagcgcccagcgccgcccatccagcggcagtaccgagtgataggcctgctgcgagagcagcgcatagtgatcgtcgatcagcactgctacctgcgggtacgccgccaacaactgccgcaacgcccgcgcccgcttcgcatccaggctggccccggtcggattgtgcgcccggggggtgagcagcaccgcacgtgcaccagcctccagcgcctgccgcagcgattcgacctgcatgccctgggcatccaccgccaccggcaacggcgcatgacccgacgcattgagcacattgaggctgccgaggaagcatggatcctccaccgcgatgcgatcacccggcagcagccacgccgccagcaggcgctcgatgccatcgacggcgccatgggtcagctccagcgcatatccctcggggcaatccgcatccagcgaggcgcgtgccagcgcctgcaacctcgtgtcgaccgtacccacgccatacagccgcggcgccgccggggtcaggcgcaggttcggcagcaggcgcggatcccgggttgccaccggccaggtcctgcagcgccagccccggggtgctgccctcgcgcgccagcggcggcggcaggccacgcaccaccgtgccgcggcggcccgccgtgctggccagtcccgccgcatccaggcgcttgtaggcagcagccacggtgttgcggttcacgcccagctgctcggccagttcacgcaccggcggcagcacgctaccggccggcaggcgacccttgccgatgccgtcgcggatgctgtcgaagatcgactcggcgctgtgcccggtgattttcattttgtcctatgccaaaatatctcttgtcctgtgccagtgtatcccaccctggccaccctgcattggaggtgcccgcatgccccttgccgctgccgactggcccgtcgcccagtccgttgaacagatcgccgccaacctggtcacggtgcgccaacgcatcgccgatgcctgcgcccgcgtcggccgcgacccggccagcgtgcgcctgctgccggtcagcaagaccgtcgatgacgcccgcatccgcatggcggtggccgccggttgccgcgagctgggcgagaacaaggtgcaggaggcgcaacgcaaggccgagacgatggccgatcttggcgtgcactggtcggtgatcgggcatctgcagaccaacaaggcgcgctacgtggcgcgcttcgccagcgagttccaggcgctggacagcctgcgcgtggccgaagcactgcagcagcgcctgcagctggaagaccgcacgctggatgtgttcgtgcaggtcaacacctccgccgaacccagcaagtacggcttggaacccgctgccgtcgaggcctttgtgcagcagcttccagcgttcgatcgcctgcgcgtgcgcggcctgatgacgctggccatcttcaccccggaggtcgagcgcgtgcgtgcctgcttcgtgcgcctgcgcgaactgcgcgaccagctgcagcgcactgcacctcccgtcatcgacctttcgcagttgtcgatgggcatgtccggagacttcgaagtggcgatcgaggaaggtgccaccgtggtccgcgtcgggcaggccatcttcggcgcacgcgccaccccggacagtttctactggcccagcaatggagcctccgcatgaagcacgcggtcgtcctgcaacacgtcgcctttgaagacctcggcaccctgcagccactgctgtcggcacagggctggcagctgcaggtgctgcaggccggtgtcgacaccctcgatccggccgaagccgccgacctgctggtcgtgctgggcggcccggtcagcgtcaacgatgttgatcgctatcccttcctcaacgacagcatcgcgttgttgcaacgtcggctgcagcagcaacggcccacgctgggcatctgcctcggcgcgcagctgatggcgcgcgcactcggtgccgacgtcgccgccagtggcggcaaggagatcggctttgcgccgctgctgctcaccgatgacggccagcgctcaccactgcaggccctgcagggcattccggtactgcattggcatggcgaggcgttcgaactcccgtccggtgcacgtcgcctggccagcacgccggcctgccgccaccaggccttcgccatgggcagccatgcgctggccctgcaatgccatccggaactggatgcccaccagttcgaacgctggctgatcggccacaccctggagctggcgcaggccggcatcgatccgaacgatcttcgcgcccaggcacgccgttacggtgcaccgctggctgcggcggccaccgcgatgttcgaccattggctgcaggagctgccggagacaccgcaatgaactaccgattgcagatccaccgcgatggcgcccactggggccacttcgactgcagcggccccgatgccatgcaacgcatggacaccatcgccgcgcagctgcctgccgaacagggcttccagctgaaacggcagaaaggcgtcggcgaagagcgcatcctgtccagcaatgccgacggcctgcgcgtactggcttcgcagatccagtaccgcgacatctgacgatcgtcacggtagtgccggccgctggccggcacccgaatctggccggccagcggccggcactaccacggctgttcgcccgcgtgcgaagcttcacgcatgctgaccctgcaacgcggcagccaccacgggctgctggtcgccccgcgctggccctccacccgtatccagctggaagaagaggtactacaacgcctgctcgatgcgcaggcaatgctgcctgccgggctgcgactgctgctcacgcgcggcttcgaacccagccacagccggctcggcagcttccgtcgtggcgtgcgttggctcggtatcgcgttgttccgggcctgctatccgcaacgccatgatgaggtcgatgccatcttcggcgccaacggccacgacatcgatggccgtcatatcgatgtctcgctggtactgcacggcaagcggctacggctgctgcccgtgggcgtattcaccccgccacgctggcaggatcgtcgcgtcgcccgccatgccgaagcggtcgcgcgggtgaagcgcagcctgcagcgctgcggcttcaagctgcatcataaccccaccgaagccctgcagatccactgcgattatcgcccgcgctgatctcccgtcccgggcaggcgtgtcacgcccatcgatagatgcaaatgattctcttttcctgtaaggtgcagccgctgcccttgccgccgcgggctgttccctttcccagttgtcgcccgccccgtgtccacgcctgtcgaaccgacggatgtcgcgcagctgtgcgcggcccattaccggccgctgcacgcccatgtccgccgtaaactcccgcaacgcagcgacgccgatgacgtcgtccaggaaacctggctgcgtgtcatcaaggtcgccgccagcggcctgctgagcaacggccgcgcctacctgtaccgcgtcgcccacaatctgatcgccgatcactaccggcaacgccagcgccgtcgtgaggaagcgctggatgacgcccaactgcacgccctcgccgaccctgcaccgctgccggagcagcacctgctggacgccgaacagctgcgccatctcgacgcgatcatcgccgcgctgccaccgcgctcgcgccaggtattcctgctggcccgggtggagcagatggcactggccgagatcggccgccggctcggcatcagccggcagaccgcgcacggccatctgctgcgtgcgctggtggcgctgcagcaggtacccggcgcatgagcccggaggcgatcgcgcgcgaggccgcgcgctggtggctggacggccacgacggcggccgcgacgagcgtgccttcaaccagtggtactacgccgattgccgccacgccgcgcagtaccagcacctgcaggcgctctggcaggccggtgatgccacgcccagcctgcagcggcatcagcgcaagcggcagcgccggcacctgcgcgacgccggcactgccgtgctgctgctttgcgccttgggcctgtatacccgccaggccgcaccaccggccgcgcaggtgatgcgcacggcggcaggcgagatccgtgaagaagtactgccggacggctcgcacgtgctgctgtcacccggaagcgaagtccatgtccgcatcgatgcacagcgccgccagctgcagctgcagcacggccaagcctggttcaaggtagccgccgatgcgcagcatccgttccaggtgcatacgacgcacggcatggtcaccgcgctcggcacggccttcgaccttgccgtgcacgacaacgacagcgtggtcaccgtcaccgagcatcgcgtccgtgtggacagcggcacccgcagtgagcaggccatcgaagggcagcagctgcgcttcgatggccaggcaccgatcatcggcctggccgccagccacagtgccctggcctggcgcgagcgtcgcctgcattgggtctccacgcccttggccgaggtcacccagggcctggatcgctggcatggcggccacacctggatcatcggcgcacacctgcgccagcagccggtcaccctgctcggcagtgcagacggtgcggcgcgcagccgcgaccagctggccacgcagctgcatgtacgcgtgctgcgcctgggcgcgggcgtgcaggtgtggctgccgccacgcagggaacatcgcgatgcaccctgacatcggccctgccactgcgtctacccaggatgacgacgcgctgcgtcagcccctggagctcccgatgctgtttcaccgtccccttgtcctcgccctgtcactggcctgcgccggtccgcttccgtcgttacctgccagcgcacacgcgcaggccgcctcccgtcacttcgatcttcctgcgcaaccgctggccagcgcgctggatgcctacagccggctgaccggtgtcgatctggtgatcggcgcggcattgccaggcggccaggcggcgccggcactacgcggacggttcgacgacgcgcaggccctgtcgcgcctgctggccggtagcggcctgcgcccccgtttcatcgacgcgcgccgcgccaccctggaaccggcgccggccgccccctccgatggcagccgtcgaaccggcccgctgcgcgtacagggcgatatcgcacacggccattcccccggtgcaggcgccagccagtatgtcccggcggcccgcgatggctttgcgcccgccgtcggcagcgagcgcgtggcgatggccgaacgccaggacggcaacagcctgctgcgttcgatgcccggcacccacagtttccactcgcgcagccagcccggcctgcaggtcaacatccgcggcatgaccggcgccgggcgggtcaacaccatgatcgatggtgtcacccagaccttccgcaacaacgcgggccatggctccggcggtccgttcgcctacgtcgaccctttcctgctggccggtgtggacgtgcaacgcggtgcggtcgccggtggtgatggtgccggcacgctggccggcagtgccaatttccgcacgctggacatcgacgacctgctcggcgaaggccgtgactggggcctgcgtgcgggctatcgccatggcagcaacggctatggcagcggccgcaccttcgccggcgcatggcgccacagcgaggacggcggtgaccgccagttcggcctgctggccgctgccagcagcagtcgcagcggcgagtacgccacggcacgcgggcagaagaacaatgccgaccccggcagccagcagcccagcagctggctgttgaaagcacgcctgcagcccactgaccagcatcggctggacctgagccacatgcgctacgaaaacgacttctaccacaactacccgtggcagatttccgcacgcaaccagcgcgccagctaccactacacgccctacacgccgtggatcgacctgcgcgcgaccttcgccggcaacaagacccggctgttctatccacccgtggaggattccagctacatcggccgccgcacccacagcagcctgagcagctggacgctcgacaacaccagccgcttcgatatcggtgcactgcaggcacgctggaacaccggcatcaagcaccagtcggacgtctacgtggccgacacccccatcctgcgcggcgccaacccccagggccgcagccagctggacagcgtgttcagcacgctggaactgcagtacgacatctacgcgctgactgcaggcctgcgccaggatcgctatggcatccgcggccacgtcccggtgtgctcggatgtgcctggccagtgcgccgagatcaacggcggcggcatcgacgtgcgccgtacccagcgcgcactcagccccagcatggcggtatcgtggcaggccaccgactggctgcaactgttcgccgaagcctcgcgtacttcccgcccgccgcgcgtgcaggagatgttcttcgagaagatccctctggaaggcatgagcgatgccgacggcgtgggtgccaacccgttcctgcgccgtgagcgttcgcgcaacctgcggttcggcgccaacctcagcgcctcctcgctgctgaccgacggtgacctggcgcagctgcgcgtcacccgcttcgacaaccgcatccgcgactacatcaagccgcagtacctgctgatcgtgcacccgccggaggtggggcctttcgtggtaccgatcgacagcgatcagcagctcactgcctggaccgatgccctggacgtggacgacttcagcaccaccacgcgctggatgaaccaccccggcgtggtgcgcatgcgcggtatcgagctggaagcgcactacgccagcgcgcactaccacgccacgctgagctggacccgctcgcgcaccagtgcgcctgccatcgaattcgtcaacctggaagacatcaccgccctgcccgaccgcttctggacgttggatgtcggcggccgctggtggcagcagcgcgtgcaggccggcctgcgcgccgaatactccgggcccaccgaagaaggctacgacttcttccagacccgcaggaccggcggtaccggtgtactgctcgacttctacgccagcttcaagccccagcccaacaccacgctgtggctgaacatcgaaaacctgcagaacaaggcctatgacaacaatgcctcgatcgacagcatcttcagcccgatcctggaccgcggcaacggccgtggccgcaccgtctcgatgggcgtcaatgtggcgttctagccgtcgctggctgccgctgtgcctgctcgcactggccgcaatcgccagcgcgcagccgatgcccggcacggtgatcgacctggccagcgggcagcgcctggacgaagccgcgttcgtgaagcgtgcagcgaacgccccgcggctgctgctgggcgaacgccacgacctggccggtgaccacgccgcccagcgctggctgctgcacgcgctgcaacggcagcgtccacaaggcgcgctggtgatggagatgatcgccagtgaacgccaaccgcgcctgcagcgggtgcagcgctggctggccaagggcaaccatgccgatggtgcgcgcctgcaggcgctgctgggctgggatacacgctggccgtgggccacctatggcgggctggtacaggacgccaccgccgccggcatccccctgttcggcggcaacctgtcgcgtgccgaggtcaatgcgttgcttgcctccaacacgtcggtgcggtttccgatgcccaccgcccggcaacgcctgtcggccgtggtgctggcccagcacgcagacgccgcaccgatgctggaagggatgctggccgtgcaacaggcccgcgacacccgcatggcacaggcactgaccgcagcccctgcacccgcgctgctggtggccggccgctggcatgtactgcgcggcaccggcgtgccgggctacctgccaccggaggtaccggcactggtgatcgcgcttgcgtcacccgacgaaggcgtcgatgcggccgacgccgatctgctgtgggtgccgggcgatgagtgaacgcggccaacactggcaggcgattgccatcagcatcggcctgcacctgttgcccttgctgctgttggtgcactggatggccgcgccaccgttgctgccgccgcctgagcaggatgtgcgcatcagcctgcgcctgctggcaccggctacgcctccccagccggtcgaagagcgccaggccgacacccccagccaggcgcagcaggcgcgcgcgtcgcaaccggcgaagtcgccccctccgccaaagcccaccgccgcccgcgagggcgaggtggccgccagcgagctcggtggccctggccggcaagccctgccggtcgccccgcctgcggccgtgaccgatgcaagtcccgcaccggcatcgatcacggccgcgccgcccgctcccgacgcaccaccggcggacttccaggccggcgccgccagcgaccagtgggaagcccgcctgatggcgcggctggagcgttatcgctactaccccgccgccgcgcgctcgcgccgtcagcaggggacggcctgggtcagggccagcatcgatcgcgagggacgcctgcaggccctgcggctggagcagtccagcggccaaccgatgctcgacgacgccgcactgcagacgttccgccgcgcgcagccgctgccgcccattcccatggaaatgaaggcaccgcaggaactggtggtgccggtggagtactacctgcgctaggcggcgtaggcctccgcctcgatctcgaacagcatgccgtccagcgccagccgtggcacaggaatcagggtgcaggtcggcgctgcgccgttcggccaacgccgccgtacctgccgggcgatgatgcccagccggtcctcgtcgtggtcgaccaccaggatgcgcaaccgcgcgacatcggccaggctggcctgcgccgaacgcaatgcgatctgcaggttgtccagtgcctgctcgacctgttccccgaagccgggggagagatgaccatcggcatcctcaccgccctgcccggcgatatggatcacccgggcgggaaggcgcaccaccgccacgtgcgagtagccgttggccgaggggtcgtaaagccccgcaggattgaacagttccagcaggccgtgactgaggtccggggtggtcaacaggttcatgccgcatgcctcgtgggggatgcgaggcagtctgcgacctcaaccagagttgaggtcaaaccgagccgctgcaacagtccggtccgccatgcgcaacgatcgtgcccacgtgtagagccgagcccacgctcggctgctcagcgcgaatggcagccgagcatgggctcggctctaccgttcacggctcacgtccacgccgggtctgcggtgaaatcaatggtcagccagaacgtgctgccccgagcatccagccgcaccgcgatctcgtcacgcatcgcatcgacctcacccaccgagcccaagggcgtcgccggatcggccaatacgtggatctcgatgaagcgcatccgccccatcttcgccacatggctggtgaaaccggcatagccacgctcggccacgaacgcctgcatcacctgctgcacgcgccggtccagatcatccggcgccacctgcagcacttcgcgcatggccttccacgcgctgcgcgccggcaccggcagcatcgccaggctgatcaatgccagcacgatcgaatccaggtacggcacccaatggtgccactcaccaccgtgcaggaccagcgccaacacgaaggccagcaccactgccaggctcatcaacccgcccagcagccagccacgcacatccagccataacagcgccgagcgcagatgccgcgcccgctgcgcaacgaacgccgccatcgccaggttgctggcactcagcagcgccgcccaccacagcgcgggcccgaatttcacttcgtgcccgcccgtggtcaggccgatcaccgcgttggccagcgcatacacgcaggccagcgacaggatcacaccacccagcgcttcgaccatcggctccaggtgccagtagccgtactggaagcgcgggctttgttcccgcgccaccagccgcagcaccgacaacgacaccagggtcagggcgacgtcgaccaggctgtacacgccgtcgaacaggatggcctgcgatcccaccagcaggccaccgccgaagccgaccgcgctcaccgcaagggtgaccccgatcgagaacgtcaggatgcgttgctcgcgcgcggtatccatcgttcgccgatgagccgaccgttacgggtcaggccttcagcacctccaccttgtacgagaccgcatcaccctcctgctcgatgatgagcccgtgcacgtccgattcgaagcccgggaaacgggcgttctgctcgcgggcgatgcgcagcgactggatgatcggctcgtcgctgtcgccgaagcgctcgcccggcatgatggtcgggatgcccggcgggtacggcaccagcatggtcgccgcgatgcggccactgatctgctcgatgtcgacccgctcgatctcgcccttgaccaggtggttgtaggcatcggccggggtcatcaccggcgtcggcaggtccacgtacatctcgcgcatcaccttggccacggcaaattcctggttgaacgcatgcagcgcgtcgcacaggtcacgcaggccccagccagcgtaggcattcggataatcggcggccagcgtcggcagtgcctggctcagcggcgcattgcggtcgtacagttccttgaacgccatcagctcggtgaccagggtgctccacttgcccttggtgatgcccatcgagaacaggaacagcaccgagtacaggttggtcttctccacggtgatgccgcggccccacaggaacttgctcagcaccgccgccgggatgcccagcctgcccatgctgccgtccattgccaggcccggggtcagcagggtcaccttgatcgggtcgatcagaacatagtcatccaccaggttctcgaagccgtgccagtgcgcatccggctgcaggtaccactcctcgcgcttggccaccatcggtgccggcgtatcgcccttgtccaggctgcgctcgacctgggtcggctgccacacgctgaaccaccagtcgtcgcggccgagatcatcgcggacgtgcagcatcgcgcggcggaaggcgatcgcctcgtcgtgcatttcctgcaccagcgaacggccggcgtcgccttccatcatcttcgacgccacatcgcaggccgcgatcaccccgtagtgcgggctggtcgaggtgtgcatcatgaacgattcgttgaagcgctcggcatcgaggttgcgttgcgccgagttgcgcacgtggatcatcgaggcctgcgaaaacgccgccagcagcttgtgggtggaatgcgtggtgaaaatgatcgcatcctgctcacgcggcttgcccttggccatgccgtagtggttctcgtagaacgggtggaacgcggcgtaggcgtaccaggcttcgtcgaaatgcaggaaatcgactgcgctgccgatctcgtcagcgatcttctcggcgttgtagcacaggccgtcgtaggtcgagttggtgaccaccgcgatgcgcggcttggagccggccttgtaggcctggctggccagcggattggcggcgatgcgctgctgcagcgactccggcgtgaactggtccaggctgatcgggccgatgatcccgtgcgcgttgcggctgggcgtgaagtacaccggcaccgcacccgtcatgatcagcgcgtgcagcagcgacttgtggcagttgcggtcaacgaacaccacgtcgccgcgggccaccgtgccatgccagacgatcttgttggcggtggaggtgccgttggtgacgaagaaggtgtggtcggcaccgaagttgcgtgccgcctcgttctcggcatccttgatcgggccggtgtgatcgagcagcgagcccagctccggcaccgagatcgacagatcgctgcgcagggtgttctcgccatagaactgatggaatgcgcggccgaccggcgacttggtgaatgccacgccgccggcatggcccggcgtatgccaggaatagttcgactcggccgcatgatggatcagcgccttgaagaacggcggcagcaggttcttcatgtagtcttcggccgcgcgcatcacctgccgcgagatgaagctcttggtgtcttcgaacaggaagatgaaaccgtggatgtacttgagcagcttgctcggcaccttctcgatggtgcggcgctcgccgtacaggaacaccggcagattggcacggcgtgcgctctgctcgcgcaggaaggcggtcaggcgctggaactcgccatccacctcttcgctgccatcgatcgagatcagcaccgccgaggccgccacgtaggtgcgggcaccggcccgggcgtcatccaggttcagcccgcacagcacgcgctggtcgttgctgcgcagctcttccaccagcgcacggatcaggatgccaccgatgcgcggcgactcgtagtcgttgtcgatgacaatgaccgggtagtccagggacttgaagtacacgttgattctccttgtcgaactcaggaatgccgggcgccggcgctgatcgccgaggcctcgcgggcgcgctgccgctgctggcggcgctcctcgctgaagaagggatagaacacggtgatgaacagcacgaacaggaaggcgtactgcacgatggtccccgacgagccgtagatcgcccacaggcagtacacgacggtcaggctggtcagcgtccagaacgcaccggtgtggaccagggtgtgcgaacgctcgaccacgaagtagcacgccacgcacgagtagatgtagggcagcagggtcagcaccacggccgccgacgtgatcacgtcgaactgggccgacgcggtttccgaggtggaggtcaccagcaccgccagggtcatcagcaccgccacgatcagcacgcccttgaccggcacgtcgtccttgttggtcttgctgaagatgctcgggaacaggccgtcatccgacgctgccttggcactctgcgcggtcagcaggatccagccacccagcgagccggcggcaccgatgaaggcgcacaggctgaccagcgcgccgccccagccaccgaccgccttggccgccgccagcgcgaacggtgcgtcggacacctgcagttccgcgttcggcaccatgcccatgatcaccgacgaactggcgatgtaggcgatggcagccaggaacacgccggccagcgtcgcgcgggcgacgttcttctccggattttcgaccacaccggcagtcaccgatgcagactcgacgccgatgaaggcccacagggtcagtgccgcagcgctcgagatcgcaccgaagttcgactcgccagacacgttgtaggcgcccttgaagatgtcggcatcgaagaagaaccagccgaaaatggcgatgcccaggatcggcaccaacgcaaagctggtggtgaccgtctgcacgcggctgacgaaggccggaccgatcacgttggcaaagctcagtgcccacaccagcaccagcaccgcgacgcaacgcaccagcggctcggacaggatcgggaagaaatagctgaaatagcccaccgccgcgatcggaatggcgacgttgccgatccagttggcgaaccagtagatggtgttggtctggaagcccatgtacggcccgaaccagtcgcgcgcgtaggcatagggaccgcccgccttgggtgcgagcttgcccagcttggcgaacacgaaggccagcagcagcgcaccggcggtggtgatcagccagccccagatcgaggcggtaccgatcttggccaggctggacggcaacaggaacacgcctgagcccatcatgttgccggcgacgaggaaggtggctccgaccaccccgattttctttgcttctgccatgacgatctccggtactggcatgagcccggcagcaccgggcgtggggacggttacgctggcgtacgaccgctggcgtctatttgatgaagttgtattgcaggctgccctgcacccggaccgtgtcgccgcgtgcgccgccctgctgttccagccggccgtacagcagctccatgcccatcgtccaggacggcgccgggctccagatcaggttgaacacgccgtagcggctctgccggaatgcatcagcggcgagtgcggcgttgcgctccagggtcagctggccaaagatcaggttggagcgccacagcgcggaccagtaatgggtgtagccgacgaaaccgccgtgcaggtccaacgcggcgaggcggccatcggcaccgaccactgcgtccagtccggagccggtcaggtcggcggtgtagcgactgaggccgcgcccgccgagtacgccgaacagcagcaggtcgcgctcgcccactgacgccgagccgctcagctgcaggccaccggccatgcgccggtcgcgctcgccatcgccgtcgtaggccaggctgcgtgccaccgcgcccagctgcaggtggccccagtcgcgctccaggcgcgcggtcacggtcacatcgggcaggcggttgactgccgtgcgagcatcgctggcgccggcgagttcagtcttcgggtcttcagcagcgacggtcagggtgttgcccttgcctatcgcaaaactgtggtggatgcccgccaccagcaggtatccggcgccgcccggcccggcgaagtcaagcgtatcgggcaggctgtccgggtccatgaagctggagtagccatagccggcataggtgttgccaagctgtccataggcgtgtcgcaggcggaactcatacccctcactgctgccgaagaaatcgttctccaggtagaaacgcaggttgccgtgcgtggtcgggcgccgcgcctcgaagctgaagcgggtctgcttggcatggatgttgaagttggagacatcgcgatggctgccacccaccggcatcgacgacggaatgaactgatcttcgtcaccggccgcacgcgaatcggcaatcgcatcgagcttggcgtagccgccgatgcggatcaccgtatcggtgccgggaatggtgaagaagcctttcagatcggggtcggtcggaccggctgcgctgtcgggacgcgacgccgccgttgagggatcggccaccgattcgcgctgcggcagcaccggttgcgccacgcccggcacctgggtcgggtgcagcatgctggcgctgccgcccgccgttgctgccggggtcggggcctgcgccacggcggcaggcgctgagccctcgcgctgctcaagccgatccaggcgctgctgcatgccttccaatgcctggcgcatggcagcgatttcctgccgcaacgcctgcgcatcttcctggccatgctgctgcgcatacgctggcgcgatcgccagtgcggtcgaacaggccagactcagtaccgccaagcgcattgcatcctccctggacaaacattcgcagcgcgctggtcggatacaggcgcacagtgccctggcctcgcgtcgccgttgctggaaatgcggatactgcgttgacgacaccggccagcctgcatccggcaggcaacaggacgatgacactgccctgcccgcaccggtgtcgagcccatcaaggccgcgctgccagagaggtggcgaccgcagcggtctgggtaacaatcggggagtgagagtgtcgtgaatggctgtgccgaccgccctggttcaaggcatgtctggcgcggcatccatggcgcgttgacgctgtattccatgcgtcaacaggctaatccgcctgtcgtttttgaccttgattggaatcaaggcgcgatgcttgatgtcagtcacgattcagatgtgacgacgaacagctgctgcgcagccctgctgccctctccgcccgccgcaggagcgccgaaatgcaacaggcccgcatgctgccatgcgggcctgtcggttacatcacgacgttggcggcgatcagcgcggacccagcaccgtctgcaggtcggcgccctgcggcaggcccgcgcgacgctgcacctgcccttgtccatcctggaacaggatgcccggcgtgccctggaagcccatctcgatcatcaggacctggttggcatcaagcttgcctgcgatctcgcggctgatgctcggtagcgccttgatgccgccacggtcgaactggtgctcattctccagcagcgccgcgctcggatcacgcgcggcgaggatggcggcggccttggccgggctgtcctcgcggatcacgccaaccatgatgtggcgcaactgcaccttgccggcgtcaacccacggacgcgccgcttcccagaacttgtggcagtacgggcagttggcatcgctgaaggtatagaccacacgcggtgcatcggccttgccgtcacgcacccaggcgctggcttccagcttggtccacatcttggccgacatcggtgcagcgaccagcttctccaccgcctcggcggccacatcgttgccttcggcatcgaacaggctgcccaccagcacatgcttgccgtcggcggtcacgtacgcggcggcgggctgctgcccccccaccacgccggcgaagccacgcaggccacccggtgcatcaaactcggcaacgacttcgaagccgtgcttctcgatgcctttcagcactgcgggacggtcgccctttgccgcggtggccggagcgccggcggccggcgctgccgccgtcttgcccggcggggtctgggcctggctgcaggcggccaatgccagcatgaccggcagcaacagcaccgccggagcgatgcgcagggaagtcgacaacatgggaactccgtaatgagatgcccgcgcaggctaccgcagccggcgcagtttgtgttcaagacccgccgccgtcagttcgccaaggtgcagttcacgcaggcgaccttcggcgtcgaagaacagcgtcgacggataggcctgcacacccagcacggttgacgccgaggcggtatcgtccagcagcacattgcccagccggagctgttcggatgcaatgaaacccttcacttcgtccagggtttccccctggttgaggaacacgaactgcacgtcggtgtgggtctgctgtgcggatgccagcaccggcatctcgcgccggcagggcccacaccagctggcccagagattcagcaccagtggcttgccccggaactgctgcaggtcgatcacgcgcccctgcagatcggccacctgcaccgccggcagcggcatccgctgctcctgccaggctgccagcaggtggctgcccaccacccacgacaccacgcccaccagtgcgcccgccagcaccggcgcacgcaacgcgcgccagagccgcagccgccaggtgccccacgccaggcccgcagccagcacgactgcaaggtgatacccaccgtcggcgatctgcaggatgctccacggggcctcacggtaaagcgcgaagttcaaggcgacgaagctgatgcgtccgcacagcaggccgatcagcaacatgtccagaaccaggctggccgcggaaggcactgccatcccgtctttccgacgcggccacaggcgtgctaccgccatggccagcagcacgcacatcaggatcaataccaccggcatcggcaccggtcccacactcgacatcagcccacctgccccatcatccgttacctgcatggtcgaagcgtcgcgcccaggttgcaagcgcgacgcctactgcaggcatcaggccatgctgcgcggcatctgcatgccgggcgccggttgcagcccgcgcaggctgcctgccaccgatggcaacagcggccgctcgcgccgcttgttgttgaccagccggcgatagttggccggcgtcattccaacaatgcgcaggaacaggcgacggaatgcgctctggtcggcatagcccacgccccaggccacttcatcgatgcccgccccctgctgcaacagcgtctgcgccttggcgatacgcaaccgctggcaatactcgatcgggcgcaggccggtggccttcaggaagcgccgctgcagggtgcgcggctccagcccggaaatctcacagatcgcaccgagcgtggcgccgcgcgcagcggtggtatgcagccagcgttgcgccttcagtacgtcgcgatcgccgtgggcgaagttggcactgaaacgctcgagatcctgctggatcgccgccggaaccgtgatccccagctgctgcgccacggaactcgccacgccctggccgtgcagccggtacagcaggcgcagggcgaggaagcgccaggcctgggaaccggccaccgtcagcaggtcgccgtcatcgaccagcgcgcgctcgctgggtacccagctggccgactgcccctgcaggcccggatggcgcccgaggtccggaccactgacggtgcgcccagccagcagaccggcgcgtgccagcatgctgacaccgtcgctggcggcagccagcagactgccaccgtcgtaatgcgcgcgcagccaatccagcagcacctcatcggcgcgcaggcagacgccctggctgatctggccaggcacggcgatcacggcggggatgtccgcctcgagcatctccgcgccggcaatgcgatgcacgccggtctggctggccggcacgatccagcgggtcaccaggacacgcttgaacggacggcgctgctgctgggcaagccggttggcgacatgtgccatctcggtcagcacggaggcggccgacgggtcgcctcccgggtattcgaccaccgcgacctcgacgaatccttcgttcctgaatccttccacagaccatctcctcggttcgttgcaggccgtccagcggccggttcaggcgcagggtaggaactgccacgacggtggggctatgaagaaagttgcaaagtgcgctgaatgcgccgtcagcgacgggaccttgaccctggaccagactcaaggcttcacaatgagcggcagcatccgcaggaatccgccatgaacattggtcaactggcacgccgggccggcgtgccgatcgatacggtgcgctactacgaacgccagcagttgctgcccacggcggcacgctcggccgggggctaccgcatcttcggtgagcaggacctgcgccggctgcgcttcatccgccgcgccaagacgctgggcttcagcctggaagaaatcgccgaactgctggcgctcagtgaccgccactcacaggacatgggcagtgtgcgcgacacggcgcaggcccggctgcaggacattgcacaacgcatggccgaactgcagcgcatgcacaccgcgctttctcagctggtcgacgcctgccccggccacggcacgctggatcagtgcccgatcctggcggcgctgaccgacgacgcggcatagcaacgcgcgtgaagaaaagtgcaacaaatgcttgccaacccccgggggcaaggctattatttcgctcctcagcgacgtggggccatagctcagctgggagagcgcctgcatggcatgcaggaggtcagcggttcgatcccgcttggctccaccaatctttcggcattaggccgtcgaaaggtcgctaaagaacattgatgagaattgcgtccccatcgtctagaggcctaggacatcaccctttcacggtggcgaccggggttcgaatccccgtggggacgccactcatcacgaacaacgaggacccggccgataaccgggtcttttttgttcaccgcctaccggcattcaggttgtggcgttgcggttcccctgccctcgtggcgacggtcgaaccttaacgaaaaagttcaaaaaaaacttccacaaacgtgaacacgcaggtatgataggcggctcggtaacacggggccatagctcagctgggagagcgcctgcatggcatgcaggaggtcagcggttcgatcccgcttggctccaccactttcgacattaggccgtcgaaggttctacaacttgaagtttttcgtgcgtccccatcgtctagaggcctaggacatcaccctttcacggtggcgaccggggttcgaatccccgtggggacgccagtttcaaaacggactctgctcccggcagatcatccggagtttcatggggccatagctcagctgggagagcgcctgcatggcatgcaggaggtcagcggttcgatcccgcttggctccaccacttcgacattaggccgtcgaaggatctacaacttgaagttttcgtgcgtccccatcgtctagaggcctaggacatcaccctttcacggtggcgaccggggttcgaatccccgtggggacgccaattcttgaaaaccccgactccggtcggggtttttctttgcctgtgattcctgggaaggccctatccacgcatggtgtggatggcttcaccccgattacagctcagaaccgccgatacatcccgatcgatgccggcgccgtgggcgcgaaaccaaactgtgcgtacaaccgatgcgcctcgccatcggccagcaggctgacgtacgccgatggcggcaggttggcctgcatccagccatccaggcgccgcatcacttccttgcccaggccctgcccctgcaaccgcggcagcaccgcgatatcacagacctgcaggtggcagccgccatcgccgacgatacggcccatcgccaccagctcagtgccctggtaggcacacacgccgaatagcgtattgggcagcgcgcgggcggccgcttcccgggccttggcactgaggcctgcaagcacgcgcaaccggcagtagtcctcgaccgtgggcacggcttcgcggaactggcaggtgatggaatcagtcatgcggcatctccagatgggtcgggctatcctgccgcatccacgtcgcagccgctgcgacccaggcccccagagtcccatgtgctattccgccctgatccgcgctgactacgccaagctggtacgcgagttcggcgccatcctgtcgctggaggagttcgccgaactgtacgcacacgatccaggcaagaaacggccgaagacgccgaaggcgatggatgacgggttcgccggtgcgcgtaccgaacagggccgggccatcgtggcgaagatccagcaatggcatgcgcaggagcagcaggcgctggaggctgaactggtccggcagcgcgaacgacgcgatattgcccacgccacgctggccacccggcccacgcagaaagcgcgcaatgacctgcgcgtggccggtaaccgcatcgagcgcgcgcaggcccggctggacgacctgcatcgggtgcagctgctgccgcgcgacaaccgcattttccccggcacctacgcgccggtgatggtcagcgagaacggccggcgcgtgatcaagccgatgcgctaccagtgccggttgccggacaagccggcgcgcaacgacgtgctgtaccccggcacctacaacgcgcggcgcgacagcctggaaggttactggcggggtgcgttcggactgcgccacggcgtggtggtggtgcaggcgttctacgagcacgtgccccgccacgccatcgccggccgcagcctcggtgccgacgaaaaggagcaggacgtggtgctcgaattccgccccgatccaccccgcgacctgctgctggcctgcctctgggcggaatgggaaggaccggaaggccgcctgctttcgtttgccacgatcaccgacacaccgcccagcgacgtcgccgctgccgggcatgaccgcggcgtggtgccgatccgcagggaacacctggacgcctggctcaaccccgaaccggatgatctggcgcgccagtaccgcatcctcgatgaccgcgaggaaatccgttacgtgtacgaggaagcgggctgagcgccggacgcgaatgaaaaaccgcgcgtgggcagggctcctggatcagggattgccgccgcgcatcgcagacgtgaggattcagcccccgcagcttccccctgccggtgcgtggcgagcggctcaggccttggcgctggagcgtcccaccgcacgcaccagcgcccgcgacagatcggccgacaggtacggcttgaccagcaacaggccggccagcatcggcgcaggcagctgctcggccagcatcccggtggccagcacgaacggaatgccacgcgccgaaagcgctgcagccactggctcactggtctcgttgcgggccagccggtaatccagcagggccacgtcaggagtgctctgctccagcagccgcagggcctcggacacactcgcggcaagcccgaccacagtcgcaccggcatgcaccagctgcatctgcagcagggccgcactcatctcgtcgttctcgaccaccagcaccctcaggtcctgcaacactgtcatcagctaccgctcctggaggcaattgcacgtcgggagtatagctaccaaggggccaatgccgacaggaaccgccctgataggctctcctactaggcatctcctgccgacctcggttacactcgcacgctgcctgccggtgtggcggaatggtatacgcagctgactcaaaatcagccgggggtgaccccatgaaggttcgagtcctttcaccggcaccactgcatcaaaggccaggtccatgacctggccttttgcatttcccgggccggagcgccggcactggcgaggatgccccagcatgcccctcccacgcttgccgacatactgcgcgcccatcgccacgtgcgggggcagccccgcgacgtctggacgtacgcccacgtcaacgccgtcgtgtcaccccgctgaaacgaaaatgtgacagccgacaaggttgcgaatagcactagcgcacacttttcttgccagcctcacctacttctgcctatcgtgatcccagccggatctgggggcgggggaatgcatgacgttgcgtgcggcactgtttttcatggtcacgcacgcgctcgtcattgccttgatcggcccgcaggacccggttggctcctacctgatgctgatcaccgccccccttctggccgctctggcctgcgtgcgacgcgcgcgcgacagccaggcggcctgcaagtggcgaacgctgggcgctgccgtcggcctgttctcgctggccctgctggccctgctgtatcgcaatgtggccggcctcagccctgcgcagatgaccgcctcgtcgctgatcctgtatgtgttctaccggattccgctgacctacgtggccgccagcccaggcggcggcaaccgctgtatccgtgcggtggacctggcggtcatcgcgctgctgtggttgctgtacttcgtgcatacgcgggcgatggcacacctcaacaccgcattgtggacgcaatgcctgcacaccctgagcaacgtgcagaacagcctggtgttctgcttcgcgctgatccgcttcctggccgaggacaatgccgaccgccgcgacttcttccgcacgttgacgatctacgcgctcggctacttcctgatggcgctctacatcaatacctggcagccgcaggtacccgatggtggctggggcgacctgctgatcagcgggctgttcgtgctgctggcagtgctggccggcagcacgtaccgcccaccggcggtggctgtgccgcgcaacctccgccgcatcgtcgatgccggcgtgccgctgatgctgccgttgctgctgatgatggtggcgctgctggtggcacgcctgcagccgaccctggccaccgtggggttcatcggtgccatgctcggccatgccctgcgcagcgtgctcacccaggtgcagatccagcgtgagcgcgacgagctggcgctgctggcccggcgcgatccgttgaccgggctcggcaaccggcgcaacttcgatgaagcgctcggcagcgcgcacggccgcgcccgtcgccagggcgtggggctggcggtgctgatgatcgatatcgaccacttcaagcgactcaacgacacctacgggcatccggaaggtgatcgccgcctgcaggcggtcgccgcgatcctcgacggctgcctgcaacgcggtgatgatctgctggcccgctacggcggcgaggagttcatcgccgccctgcccgcgcccgacatcggccacgccctgggcctgggcgagcgcctgcgcgccgccgtggaagccgccgccctgcccgccgcccaggcccacgtgaccatcagcatcggcgtggcctggcaggccgcccatgatgagggtgacccgcgcagcctggtcgagcgtgccgaccaggccctgtaccgggccaagcatgccggccgcaactgcgtgcacgccgccccggccgtcgaggccggggaacaacacgccgaccgccgcgcctagaccgcgcgcagcaccgccgcaccatgcaggtgccccgccccaccctgcacgcggaagctggccaccgtctgcagcagctgcgccgactgttcttccatgctgcgcgccgcggccgaagcttcctcgaccagcgcggcgttctgctgggtgccctggtcgatcagatcgacggcatggttcatctgctggatgtcgtcgctctgctgctgcgcggccgtgctgatctcggacatcaggtcgctgacccggcgcacgttgaccacgatctcgtccatggtgcggccggcgctctcaacctgcgcggtaccggcaccgacattggccaccgacgcatcgatcagctgcttgatctccttggcggcactggccgagcgctgcgacagttcccggatctcggtggcgaccacggcgaagccacgcccgtgttcgcccgcacgcgcggcttccaccgcggcgttcagggcaaggatgttggtctggaaggcgatgccgtcgatcacgccgatgatgtcgacgatgcggcgcgaggacgcgttgatcaccgccatggtttccaccacttcgtgcactacgttaccgccgcgcgcggcgacatcggcggcaccaccagccagctgactggcctgccgtgcgttggtcgcggtgcgctgcacggtctcggccaggcccttcatcgacaccgcggtctcctccagcgacgctgcctgctgctcggtgcgctgcgacagatcgctgttgccctgcgcgatctcggtggcaccgacggcgatggtgtcagcggcgaacttgatctggccgatgatcgcggccatcgcctcgaccagcgaattcaccccttcgcacagctcggcgatcggcccggtcttgtcggcggtggccacgcgccgggtcaggtcgccctccttggcggccgccaccacttcacgggtctgcgccacggcacgctgcatggcctggttctcatgcacctgcgcggtgatgtcggtggcgtacttgaccaccttgaacggcttcccgttgaggtccaggatcgggttgtaggacgcctggatccagacctcgcgtccgcccttgccgaggcgccggtactggccggcatcatattcgccacggccgagcttttcccagaactgccgatactcggcactgctgcgatactcaggttcgacgaacagcgagtggtgctggccacgcacatcatccaggctgtaaccggtggcagccaggaagttgtcgttggccgacaggatgcggccatccatgctgaactcgatcaccgcctgcgacttgtcgatcgccgccagctggccggccgagtcggccgcctgcagcttctgcgcagtgatgtcagtggcgaacttgaccaccttgtacggacgcccctgccggtccagcaccgggttgtacgaggcctggatccagatctcgcgctggttcttgccaaaacgccggtactggcccgcgtcatattcgccacgacccagccgcgcccagaagtcacggtatccggcgctgcgcgcctgctcggggtcgacgaacagggaatgatgcttgccctggatctcttccagccggtaacccatcgcctgcaggaagttctcgttggcctgcaggatggtgccatcgagggcgaactcgatgaccgcctggacccggtgcagcgccgcgacctgcgcctccagctcggcacggccatcggccgccgcctcgacgccgctgcggtgctgcggtgccagcgcgcccagcagggcgcgccacggcgaccaacgggtatgcagctcggccggcgcctgcgcgcccgccgtaaagcctggaatgagcattgtctgatcctcggtgtccggtaagcggttgcgacccgacgggcgggatgcccggcggcaacttcagttgcttgggactacaggtaccggcaggcacccctcgagcggctggcaagaacgtctggtgcgggtgcgatcggcatagggagcggcggaacacacagcgcgggccgcccgtcggggcagcctggggtcctgcagcgggcgacttgagcgggatccagagggaatatcggcgatgcgatcggtggctttagccggattccgcgacgtccgtcgcatcttcagatgctgctgcagggatgcggtagacaatcgcgatgcacttcacattctgctcacgcgcgacaggggcaccgccgagcggtttcgccaggtgccggctgggcaggttctgctcggcaccgggtgtcgtcagggcatatgtcgcgcgttgtcgccgtcactgggcatagccttgcccggcacgcggatgcagttcaagcggaaaaggtttgcatgaccaacgggagatccgatggcagatgaaactggccagcatgcagcgaaccgcaggacgctcactgacacggagatcgcatgttcccacgcctggccagtttcctcatcctgggcctgtgcagcagcggcgccttcgctgccgacgccacctaccgccccagcttccatcccgaccagctgaagggcccgcctgccgggcgcccgaacgaagtgctggtactgggcaccccccacttgtccggcctgcccaagtccttccagcccgccttgcttgaaccgttgctgcagcgactggtcgcctggaagcccgagctgatcgccaccgaagacctgtcaggcctgcagtgcgatttcatgcgtcgctacccggcacgctatgcggagagcgtggccacctactgcttcgacaccaccgctgcgcaggctgcgaccggactggacgtgcctacggcgaacacccaggccgagcacctgcttgcgacctggccggacgagccgacgcccgcccagcgtcgtcggctcgcagcattgttcctggcagcgggtgaacgcggctcggcgcaggtgcagtggctgcgcctgcctgcgtccgagcgcaaaggcggtgatggactgacacctgccctggtcgagatcctcgaaaaaggcctggttcgccgcaatgaaacccacctgatcgccgccgaggtcgccgcccgcctcgggcaggaacgcctgtgggccgtggacgaccacacggccgattcgcccacgcccgccgaggatgaagcggcggccagcgcggccatcaccggtgcctggaacaatacgcactcgcgcgcgcggcgggaggccgatgaacgcctcgtggccgatctggacaagcccggcggcgtcatggcgctgtatcgggactacaacagcccggcggcggcgatggccgcctaccagagcgacttcggcgcgacgctcgtcgagccgtcctccaaggcgttcggccggatgtacgtcggttactgggaaacccgcaacctgcgcatggtcgccaacatccgcgacgtgctgagccagcatcctggcagacgcatgctggccatcgtgggtgcctcgcacaagggctactacgaggcctacctcaatcagatgcatgacgtgcggctggtcagtgcggacacggtattgcgttgacgggaacaggtgccggccatgcgccggcgctatcctgcaaggcccgattcgcaggtgccgacatgctgaaagtgatcgccgaggatttcatccatcccgatgcggtggacaccgtgcttcccctgtaccgggagctggtcgcgtgcacgctgcgcgagccgctctgcctcggctatgaactgttcgtcgaccagaaggatccgggccacttcatcttcatcgagctgtggcccgaccgcgccgcgctcgacctgcactgtgccagcgaacacttccagcgcctggtgccacagatcaatgccttccagtgtgcgccgtgccggttcctgctgatggatgccgtacgggtgtagtgcctgcagcgggatgcacatgatcgctgcggccatgccgccacagcaacaggcaggccgcaaccgtgcaggacaggctcaggaccagcagcgcgactgcaccttgctgcaacacgggcaacaacgcccttgcgtgcaggtcgccgcgcagctgttcggcgcgtagacaggcggccagcgccaggcaccagccgatcagggccggaatgaacttgcgtaccgcaaccgggttccaggcattcatggaggttacctgcgtgagtggagtgcgcgcagtattcgcgcgcgtcctctcacaggctgagatcagtcctccgcggcgtcgggatcgtcacccggaagctgggacaactcgccctgcacctgcacgttgttgcgccccatcgccttggcccggtagcactgggcatcggccgcagccaccgcctggtccacgctcatgccgccggccagcggcgcgataccgatgctggcaccgatccgcagccggtcctggtcccacggaatggacagcgcggccagggtgtgcagcagctcgcccccgatgcgggccgcacgccgcggcgtgcaaccggacaggatgaccgcgaattcgtcgccgcccaaccgtgccaccacgtccgaatcgcgcacgccatggcgcagcacgctggccaccgcccacagcacggcatcgccggccagatggccccaggtgtcgttgaccggcttgaagcggtccagatcgatgtacatcagcgaggcagcctggccggtgcgctccacgcgggtgatcgcctgctgcaggtgtacctcgaaaccgcggcggttgctcagttcggtgagcggatcgatctcggccaggtggcgggcttcgcgctggcgtgcccgctgctgggtgtcgtcgcgcaacacccacaccgcgccgcgcacgtggccttcgtcatcgcgcagccaggcgcgggtcaggtccaccggcaccgttgccgtgcccaggcgcagcagcaggtcggcgtgcaggtccaccgcgttgctctccgggtccagcagcaccgtcacatccagtaccgaaccgggcgcgtactcggtggtcagcgccagcacgtcctgaaccttgtgcccggccagcgacaatgcgccatcaccggccagggtgcgcaccgcagccgcgttggcgtagtcgatgcggccatcaaggctgacgctgagcaccaggtcggccaccgcatccagcgtgattcggctgcgttgttcactctcgaacaggcgctgctcgctgctgcgctgggcggtgatgtcctggatctgcgacacgaaatgcagcggttcgccatgctcgttgcgcaccagcgacaccgacagccgcgcccagatgatgcggccgtcgcggtcgaggtagcgcttttccaggtgatagtggctgcgtcgcccggccaacaggtcctgtaccagggccaggtcggtctgcaggtcatcgggatgggtcaggcgctggaaatcgacctgcagcagctcttctcgcgggtagcccagtatccggcacagcgcgtcgttgacatccagccagcgtccttccagcgacaccagtgccatgcccagtgcggcggaggtgaacgcgccagcgaacttctctgccgaaagtcgtgcttcggcgcgtgcctgcaggatctcggtaatgtcgatggccatgccgacgtagccgatgcgcgttccatcggcactctccatgcggctgatcgacaggcgtacctggcgtgactggccatccttgcgcagcagcgtccactgccgcgagtaggtctgcccgtcggcacgcgcgctcagcgcctcgaacacgccgggaagattgccatcagcatcggccagcggctgcaaccacgctttcagttcggctggatcgtggaaggcgtcgagccggcgctggccgaccacctccgccgcgctgtagcccagcaggcgctccgcccccgtgttgaacagggtgatggtgccatcggtatcggtggcgatcaccgccacctcatcggacgcatcgaccacggcctgcaggcgttgccgggtctcggccgcgtcctgccttgcctgctgcagctcggtgacatcggcatgggcaccggccatccacagcggcttgccctgcccgtcccattcaaagacccggccacggtcctggatccagatccactggccgttcctgtggcgcatgcgcagcaggcaggcgtagttgtcgctgcgcccttcgaaatggtcgtccagcgctgcatcggacagcgcaatgtcatcgggatggaccagcttcaggaacgtcttctggcagatcggttccagctcatccaggcgataaccgacaatctcggcccagcgcgcattgacccgcatctcgccggtctgcacgttccattcccaggtacccgcagcggtaccgtcgatgatcatcgccagccggcgacgctcttcagccaacgcctgcaggcggcgctccagcagtccattgccgtgggtgccctggcccggcatcactccggtcccctgccggcacgggcaggcgccgaccgcagcgaagcactgcggcctgcaacgaagacggcgggtcgtgctggcgtcatggtcctccccagcgacagcggggaggccaaacgcccccctcaggcgcaagtgtgcgcaatcacggggaaaaccgacaagccccccgccccggatcaaccgtgacggggggcacgatcctcagctgcgcttggcccgggcaaaggcttcggccagggcattgttggccggcggcgcagactgggccggacggccgccagcgccctggccgcggttcggtccacggttctggccgccagcgtcacggcgcggcccttggccctggccccgctcatcgcgctggcccgggcggctggtggcctggcccggggtatcgtccaggcgccgggtcagggcgatgcgcttgcgcgccacgtccacctccagcaccttcaccttgacgatgtcaccggccttgaccacgtcgcgcgggtccttcacgaaggtatcggagagcgccgagatgtggatcaggccgtcctggtgcacgccgatatcgacaaaggccccgaaggcggccacgttgctgaccacgccctccagcaccatgccctcgcgcaggtccttgatgtcctcgacgccctcggcgaagcgcgccgccttgaactccgggcgcgggtcgcggcccggcttttccagttccttcaggatgtcgcgcacggtcgggacgccaaaggtgtcgtcggtgaactgttctgccttcaggccacgcaggaagctgccgtcaccgatcagcgccttgatcgggcgcgcggtgctggccacgatgcgctcaaccaccggataggcttcggggtgtaccgccgaggcgtccagcggctggtcgccatcggcgatgcgcaggaagccggcgcactgctcgaaggtcttctcgcccaggcgcgcgaccttcagcaggtccttgcggcgcttgaacgggccgttgtcgtcgcgatggcgcacgatgttctcggccaccgtggccgacaggccggacacccgggacagcagcgcggccgaggcggtgttgacatacacgccgaccgcgttcacgcagtcctccacgcgcgcgtccagcgcccgcgccaggcggtactggtccacgtcgtgctggtactggccgacaccgatcgccttgggttcgatcttgaccagttcggccagcgggtcctgcaggcgacgagcgatcgataccgcgccacgcagcgacacgtccagccccgggaactccttggccgcgaactcggaggccgagtacaccgaggcgcccgcctcgctgaccacgaccttctgcagcttcgggttggcggcagccttgatcgcttcgccggccagcttgtcggtttcgcggctggcggtgccattgccgatcgcgatcagctccacgttgtgcttggcgcacagctgcttgatcgtctgcaccgactggtcccactggcgacgtggctcatgcgggtagatggtgtcggtggcgaccagcttgcctgtggcatcgaccacggcgatcttgcagccggtacggatgccagggtccaggcccagcacagtcttcgggccggccggtgcggccagcagcaggtccttcaggttgtcgccgaacaccgcgatggcttcggcttcggccttttcgcgggcctggttgaacaggtccagcagaagatgggtgtgcagcttggcgcgccaggtcaggcggcaggcatccagcagccagcggtcggcggcacgcccccggtcggcgatgccggccttgcgtgccacccgaccctcggcgtactggtggcccgcttcggcatcgctgcccgggtccagttccaggaacaggatctcttcgcggcgcgcgcggaacagcgccagcaaccggtgcgagggaatcttcgccagagattcggcatgttcgaaatagtcgcggtacttggcgccttcggtttccttgccctcggccacgcgggcacggatcacgccggtctcgcccagccaggtgcgcagctcgccaaccaacgcggcatcttcgccccagcgctccatcaggatcgcgcgggcgccttccagcgcggccttggtgtcggccacacccttgtcggtatcgacgaaggtggccgcgaacgtctgcgggtcctgcgtcggatcggccagcaggccatcggccagcggctccagaccggcctcgcgggcgatctgggcgcgggtacggcgcttgggcttgtaaggcaggtacaggtcttccagccggctcttggtatcggcggccaggatgtcattgcgcagctcgtcgctgagcttgccctgctcgccgatactggccagcaccgccgcacggcggtcctccagctcgcgcaggtaggtcagccgggtttccaggttgcgcagctgggtgtcgtccaggccaccggtcacttccttgcggtagcgcgcgatgaacggaacgctggcgccctcgtcgagcaggccgacggcggcgcgtacctgggcggactgggcaccgatctcgtcggcgatggtctgggcgatctgctgggcgagcgcgctctgggcgttcttggcgtcgtgcattgcttcaggtctgagccgcgttacgggaagaccccattctggcaaccgacgacggagccggacaaggcattgacaggggacgaggtacagcggcgtagccggagtggacgccggcatcctggcaaagagcgggcccggactggcccggggctgggatgccggcgcgggcgcgcgatggtgggcgcgccctgccgcgtgttgcgtaggtcagcggtagtggcgggcggcgcgctgcatgacgatctcgtcacgcatgccttccagggccatcaggcggaccttgccgacaccctgcagttccatgaaccgctccgtgtagaactccggccccagcgcggtgtcggcgcgggatttgctgaagccgtagggcaccacgcccttctcgccatccttgctaccaccgacataaagaacgattgccatgtgatgtattcctccaaattgctactgcgtactgcactcgatgagcgatgctgcgagctcatcgggagagagcttaccgcgtcgaacctgactggaacgtcacgaaggctaatgacgatcggttgcatgcagatgactgcgggatcgcagcagaatgcttacggatccttaacttccggctaacgaatccgtgggggattcccgccaacggcgcagcccctcgtgggtggtcgtgtaacgcgtttgatgtgattgggccgggcgaggtgggtgcgcgtgacacgccgtgaacccgtccctgggggctcgatggcgccatccatggcaccaacggtcccgcgcacccaccccgcccggcccctgacagtttttcgggcacgtccagccacggaaaagaaaaaagaagatcaaaagcaaaaacagcttgcctggccgctttttgtagagccgagcccacgctcggctgctttccggccagtccgcgaagccgagcgcaggctcgggctctacacgagcaagcgcagcgcgcgacccgcttttgctgttctttatctcttccgtggctggacgcgcacggaatctgtcagcggccgggtgggtgggggtggcggggtatccgcggcatgggtcgggcgcatgcgcccgacgggttgggcaggacgcccaaccccggtcttgccgtgtgcgcaggacagcgcacacgtgcaagccgcggccaagcccccatggatgggttcacggcgtccgcgctggccccacccacccggccagcccccaggaagcaggcattccgcgaccaagccacgaggggctgcgccgttggctggaaactacggccaccagccgtgcccgaaccgggcgaaatgatcggccgcccgctcgaacggattgcgcgcactcaccccgccacacagcaggtacaccggcaggtacagcggccccagcaccatgtactggtagacatgcgcacgctcatggtcgtccagccggatcagcggctccacgccccaccccgcctgatgcgcgtaggtccggcaggaaatgccaagatcgtggcccgtgtgcaggatcacattgcccaaggtgatcgccccacccggcccccacggccagcggtcgaacaccagcgcgcagtcacgccggctccagcgcaatgtcgcgccgccgagcatgccggccagcccacccatcaggccgatcagggtgttgggcagggtccacaccgcgctcagcacctgcagcgcgcgcagccagatcggccaaggccgggaggcggtgttcaatcggcctcgttcggcatcagcagccacaggatcaggtagaccaggatgccggggaaagccgccgaggccagcgacagcagcacgtagaccacccgcagaagggtggcattccagccgaaccgatgggcaatgccacccatcacgccggcgatcatgcggtcgttcaatgaacgcgacagtgtcttgggcgtggtgttcatggcggcggctccgggcaacggacagggcagtcgagcgtggctcgactctacaccctgcccatgtctacggcgtgcggtgacgcagcgcctgcaggcgcgcaccgaaccaggtggctgcggtctgttcaggctgccccgggcactggatgcgatagggtttgccgctcatgctgctctggctggcggcgcgctcgatgaactgctcggcgctgtccaccatgtccttcttcagcagatagtcgtacttgcgctgcagatgcgcgcgcgcatcgccgccgtcgtaccagctgccattgcgctggaaccggcactgggagccgtccaggctggcgatcaactgggcgatctcccgccgtgcatccgcactgggtgcggcctgggcaaggggcgctgccagcagtaccgcaagaatcaacaaaacccggtacgtcatcatccctccaagtcagtcgagcagggctcgactctacaggtcgcgcgccttcagccaaccatcgatcgtggccggcacttcgcgctgcgcgcgcccggacacgtagatgccgatatggccaccgcggaagctggactcggtgtagtcgtccgtgcccaggcgcccgcgcatcgcgcgcgaggcgtccggcggcaccagatgatcctgctcggcgtagatgttcagcaccggcagcgtcacctgcgacaggtccactgcttcctcgccgatccttaccgtgcccttcatcaggccattggcctggtagaactgcttgatgaaatcgcggaacgcctcgcccgccaggtccggcgaatcgaagatccacttctccatgcgcaggaagtcctccagcgccgccttgtcatcgaggatgtcgagcaggccgacgtacttctgcacgttcaggcggaacggcttgagcatcaggtagctggcgttcatcaggtcggccgggatgttgcccagcgtatcgaccagcaggtccacgtccacctgccgcgcccagtgcgagagcatgttgtcggcggtctggaaatcgaccggggtgaccatggtgatcagcttgcccagcttctgttggcgcaacgctgcgtagcagagtgcgaacacgccgccctggcagatgccgagcaggtcgaccgggccaccactgcgcacgcgcagcgcatcgaccgctccgtcgatgtagcgcagcaggtagtcctccagggtctggaagcgttcggaccggtccgggtagccccagtccagcacgtacacgtcctggccgagcgccagcagcttctgcaccagcgaacggtcggcctgcaggtcgaccatgtacggccggttgaccagcgcgtagacgatcagcagcggcgtgcgccgggtcggcgcctgctcaccgacgaagcgatacagcaccaccttgccgtcgcgccagacttcctcgcgcgcggtcacgccatagtgcacgtcttccacctgcggcagcagcttcagcccttccatcagcttgcgctgcatggccaggctctcctgcatcaggtcatcggcgttgaagcccaatggtcccttcatcggtcacgcgcccgagcggaagcgcgaggtgcggccttcttcgcagatgtcttctttgcagatgtcttcttcgcaggcgccttctttgccggcgcggccttcttcgcggccttgcgcgcagttggcttcaccttcgccggcgccggctgcgccaccggatcgacctcagcggttccggccagcacagccacctgcgcctgcaggcggcgcaggctgcgctccagctcggcgatgcggcggtgtgcggcatccatctcgctccgggtcggcaggccgatccgttcactcatctgttccacctcccgctgcaggccggcgcgcaggcgcatctgcgcgttgcccagcgaggcgtacacctgctggaacggttcggacatggcgaccttggcgtaggcctcctcggcaacttcgatccacaggtcgaacatcgcgcgggcgctggtcagctggctgccgggctgttcgtgctcggccaggcgctgctcgaacagcgcaaaggcttcgtccagtgcctgcttgatctgatcgacataggcgcgcgaatgctgctggtattcctcctgcgcacgcagcagggcctgccagcgcgcctggtgctcgcggccggggccgaatgccgggctctgcagccacgggcccgcctgcagctggaactgctgcagccaggcggcgaattcgggtatcgcggcgccggcgtgcgtgctgccacgggcgccctgcagcatccactggagcatgccgtcgccctgcccctgcaccgcctcgcgccaggcctgggcaacatcggcactgctggcgtcgcggcccgcaaaccgtgcggcgacctcctgcatggtgccgtaccagctgcccgcctgttcgcggaaccggcgcacggcatcttccggcgcgccctgcgcctgctcgggcaacagctggccccaccagtcgaacaaccgctgccaactgccgggatcgtcaccggcgggtgcgccgggcgtgctcgcatggcgcagggcatcgccccaggcgccgaaatactgccgggccagggtttcaaaatcgctgctgccggtgtcgtgggccgagctggtcatcgcaggcctccgcagggctggctcatggcttgggaatacgcaaggtcttgctgatcatcagcgacccggacagggcgaacaacagcaccatcgggtgcagctgccacgggccgatctgccactggccgaaccagatgttctggccgatggcatcggtgccggcggcaatcgccagtacgatcaccagcaccaggctggtcgggatcggggtgccctcgaaatacgtgaccttgccctcgtcgccggcgagcgcctcggcagtgacgttgtagcgtgccaggcggctgacgccgcagcagacgaagtagctcagcaccagccagtcccatccgccctgcatgccgcaggcataggccagcgccgccggcgccacgccgaaggagatcacgtcggacagcgagtccagctcgcggcccagggtggagctggacttgcgccagcgcgcgatgcgcccgtcgagggcgtcgaagatgaaggccagcgggatcagcgccatgccgaacagcagatagccgcgctcgccgtcctgcaggaagcgcatcgcggcaaagaccgcaccggtgccgcagaaagcattggccagggtgaaccagtcggccagctggaattcgcgcagcatcgagaagtgacgtttcatggggtctcacggagcatcaaggcccacaggttaccgcgagcgccgccgctggcgacagcgctggcgcggccgatccttcaccgccccctcacccgtcgtcaccggcggtgaatttttcgccacccatcttgacagcctaggggggtggcgcctgtcggggcttatccacaaagttgcccacgcgtaatccacaccccctgtggacaaccagatctcaccgactgcgacggtggacatttcctcatcactcttccgcggggtttccctacttcccaagccgcagagtcggcgctatggtcaccggcgggcccgccgccgccgcgtccgattcctggtgacgggcggcgatgatgccggatgcttccacctgccgctggcgcagcggccctgaagtggtagagccggccgctggccggctgccccgaccgttccgcgttgccggccagcggccggcactacccagcctgcacccgccgccagcgctcgaaacagaacacctgcatcaccagcatcgccagcaaccccagcggccacgcccaccacacgccggccagcccgtgctgcgcctgcatccacatcgccagtggcagctccagcagcaataccgccgccatgcccagcagcgctggccgccataccgtgccactgccgcgcatcactcctaccagcacggtgctgccgcccaacgccagcacgccccatgccaccgtgcgcaacttcagcgtcgccagttcacgcgcttcggcagccaccaggatcaggccggtcagccagggcgcaagcgccatcaccagcagcaccactgcactcagcatcgccagtccaagcagcacgccggtgcgggcgatggccggcagccgtgccgtacgccctgcacccatcgcatgcgccgcgaggatggtggcggtaatgcccagcgacatcgccggcagctgcacccagctcatcaactggttgaccgcaccgtaggcggccgtggccgtgtagccgtagcggttgatccagcccagcaatacgatctcggcaatggccaggctgagcatctgcagcgaagacggtacgccgatgcgcagcatcgcgcggatgagcgcgccatcgaaacggatggcacgcaactgctcgcgccgtggcgccaggggatgtcctacccgatgccagcgccacagcaaccagcccagggccaacaatgaggcaaacgccgccgatacagccgcactggccgaccccagccgcggcaggccggtccagcccaggatcagcagcggcgtgcacagcaggccgaccaccgtggccagcagcagcgcctgcagcggcgtctttgcatcgcccactgcgcggctcacggcagtggccagccacagcaggaagaacaccggagccgccagcaacagcacgcgcgcgtacacgatggactcgccgaggatcgctgccggcgtgcccagtgccgccagcagctgtggcgcgaaaccgccgcccagggccatcaccagcaccgacaacagcaggatcagcgccaccgcgctgccggccaccgcgcgcgcctgttgcgggcggcccgcgccccaggcctggccgatcagcaccatcgcgcccgtggccaggcccatcaccagggccagcagcaggaaaaagaccgggaagaacgccgcggccgcagccaccgcctgtgtgccaagcaggtggccgagatagatgttgtccagcgtgcctgcggccagctgcaacgcattggtcagcagcatcggcagcagcagcgtcaggtaggtgcgccacagcgggggtgctgccggaggtgtcggatgtacaggggggctcatgggattctctgggcaaggcgccgccctgcccggcgtttccgccagcaaagcaagcacaggggaagcgggccgcggcccgcgatcagatgacgccgtcgctcagcaacggcgcgatggctcagccgtcagcgtcttcgaacgccagccgcagggcgtggtcgcgcacatccctgggccaggaatgcagcgccgcttccaggcccgcgcggtcatgcgcgaacagcacccgaatggcctcctcgaagcccggcaggtcaccggcgatggcctgcaggaagtgataggtacgctcgctgtggcggcgctgccgatcctcgtcggcaccggcacggctggccgcttccaccagcctgcgcagcaccaccgaggccccacccggctgttcggccaaccacgcccaatgccgcggcagcagcgtcacttcgcgggcgaccacgcccagcctggggcggccacggccacgcggggttgcgggcgcctctccggcagtgacgtcggcacccgcctccacggcggagggaaacgcttcggtcacccgcgccagcagctctgtgtcgctgccgcgcgtgtcgaaatcgcgggttcgcccgctggcgttgtcgaacaccagcagcggaccggctgcgttgtcggcacgcagctgtttcaacgccagcgctgccacttccggggtaccggaagcgaccaggcgatggccgtcgaaacagctgaagggaggaagtcgggacacaggcatggcaatggcatcagaggcgatgcgcgaatattgcccgggtaatttcaccgagtcaatattatccgggtattaatttgccagaagagcgtgccaaccaaggttggcacccacccgattcgtcacctcacagccggctgtaggaccagctgaccatgcggccgtccttgtacggcatcacgccgtggaacgggcgcgggtcggcgtcgaacaccagcggcaggaagttgcggtcgccctcccacatcggcagcgtgtccagcttgtccaggtccacccactccagcgtgccttcatggttgccgccgtgcggggtgccttcgaaagtatcgatgacgaacacgaagcccagccagtcttcaccgtgcttgccgaagcccggccagctgagggtgccgcgcaggcgcatgccggtgcagtcgatgccggcttcctcggcgatctcgcgacgcatgctggctgccacgtcctcgtccgcttcgatcttgccgcccagcccgttgtacttgcccaggtggtggtcacccggacgggtgttgcgatggatcatcagcacctggcgacgatcaggcgacagcacgtagcccagggtggcgacgatcggggtgtacggcatgggcggcatccagcggcaggtcagcaggattatggccgatcagcgcaccagcgacaggcggcgctcggcgggtgtgcctgcgccatcgggatcgcggcgcagggtggccacgccgtgaccgcgctcagccaggtattccagccacttgccgaggaaggtgttcatccgcatgcggtggctgatcagctcggccggcggcgggtacaggcccatcgtgtcctgccagcggcggccgacgtagcaatgggtggtctcggcctggcgtgcgtcacggtaaaggcgcacatacgccgagggatccggctcaccggtgaccgggtcggccaggtcgtaggtcaggcgcagttccaccgtgtagcggtggcactcgatcacgtccaggcgtacgtccaggccgtcgccgatcgaggaaatgtagctgcccgccaccaatccggccggttcgaacaggcgcaccagatggcggtagttctccgcgtacaggcccatgagccagctcaaccggctcaggcggggaatacgttcggtgcggggcgaggcttgggccatgggtcgatcctacacgttggtgcttcaacgtgggggcgcctcaagccacagccaacccgacaacgacgatccccgtgtagagccgagcccatgctctgttcgggaagaacccggcggcccagccgagcgtgggctcggctctacagggcgaagtgcagcgcgccggaaaggctcaatacagctcgcgctgcagccccagcgtggccagcaccttgctggaaatctcctcgatcgaggtatgcgtggtgctcagggtcgggatccgctccatgcggaacatggtctcggccgcagccacctcgcgcttgcaggtctccaggttggcgtagcgcgagttcggacggcgctcctggcggatctgctgcagccggtccggatcgatggtcaggccgaacagcttgcgccggtaattgcgcagtcgcggcggcaggcgatcgctttccaggtcttcgtcggtcagcgggtagttggccgcgcgtaccccgtaatgcagggccaggtagatgcaggtcggcgtcttgcccgcgcgcgacaccgccaccaggatcacgtcggcatcgtcgtagttcaccgcgatgccgtcgtcatgggtcagggcgaagttcatcgcgttgatgcgacggtggtaggtatcgaaatcgaccatgccgtgggcctggccgacccgggccaggcgcgggctggccagttcacgctccagcggctcgatgaacggcgcgaacacatccagcatcagcgccccgctgtcggccaggatcaggctcaggctctggtccacgcaggagttcaccacgatcggccggacttggtagcgctcccctgctgcctggatccgggcacaggcttcacgcgctttttcggggtcgtcgacaaacgacatgcggtcggtaatgaagctgaacccggagaactgggtcagcaggctatgcccaatggtttcagcggtgataccggttccatcggaaacgtagaacaccggacggatggtcgacatgcgcgcttttaccccctacgaagcttaaaaaggccgccagcacaagcttgtgccgacggtgctctgcccggcatcatatcggcttcttcctacggacgcggccactcagcccgcctcgggcgatggccaaacggagcatcgcgcttgaacgagaacatcctgtggttgcacgaactgcgtctggccgatctggcccgcgtaggcggcaagaattcgtcgctgggcgagatgatcggcaacctggccggtctgggcgtttcggtgccgggcggttatgccaccaccgctgaagccttcaaggacttcattgcgcacaacgatctgtccaagcgcatcttcgacaggctggccacgctggacgtcgaggacgtcaacgcgctgaccgccgccggcaaggaaatccgcagttgggtgatcgatgcgccgctgcagccgcagctggaccaggacatccgcaccgcttacgccaagctgagcgccgacaacggcggcggcgacgtggccgtggccgtgcgttcctcggccaccgccgaggatctgccggatgcctccttcgccggccagcaggaaaccttcctcaacgtcaccggtgccgacgacgtcgtgcacaaggtcaaggaagtgttcgcctcgctgtacaacgaccgcgccatcgcctaccgcgtgcaccacggcttcaagcatgaggatgtgttcctgtccgccggcgtgcagctgatggtgcgttcgggcgtcggttcgtccggcgtgctgttcaccctggacaccgagtccggcttccgcgacgtggtgttcgtcacctcttcgttcggcctgggcgaaatggtcgtgcagggcgcggtcaatcccgacgagtactacgtctacaagcccaccctgcaggccggcaagccggcgatcctgcgccgctcgctcggcagcaaggcgatccgcatggtgtactcggatgttccgggtgagcgcgtcaggatcgaggacaccccggccgagctgcgcaacaccttctcgatcagcgacgaggacgtgcaggaactgtccaagcaggcgctggtcatcgaaaagcactacggccgcccgatggacatcgagtgggccaaggacggcgtcagcggcaagctgttcatcgtgcaggcgcgcccggaaacggtgaagtcgcgcagccacgccacccagatcgagcgcttcgcgctgaccgagaagggcggcaacgtgctggccgaaggccgcgccgtcggcgccaagatcggctcgggcgtggcccgcgtggtgaagacgctggacgacatgaaccgcgtgcagccgggcgacgtactgatcgccgacatgaccgatcccgactgggaaccggtgatgaagcgcgcttcggccatcgtcaccaaccgtggcggccgtacctgccacgccgcgatcatcgcgcgcgagctgggcgtgccggccgtggtcggttcgggcaacgccaccaaggtgatcgaagatggccagctggtcaccgtcagctgcgctgaaggtgataccggcttcatctacgaaggaaagctcggcttcgagcgcaccaccaccgatctgggcaacatgccgccggcaccgctgaagatcatgatgaacgtggccaacccggaacgtgccttcgacttcggccagctgccgaacgccggcatcggcctggcccgcctggaaatgatcatcgccagccacatcggcatccacccgaacgcgctgctggaatacgaccgccaggatgcggcgaccaagaagaagatcgacgagaagatcgccggctacggcgatccggtcagcttctacgtggaccgcctggccgaaggcatcgccacgctcaccgcctcggttgcaccgaacccggtgatcgtgcgcctgtcggatttcaagtccaacgagtacgccaacctgatcggcggcagcaactacgagccgcacgaagaaaacccgatgatcggcttccgcggcgccagccgttacgtcgacccgagcttctcggccgccttcgcgctggagtgcaaggccgtgctgcgcgtgcgcaacgaaatgggcctggacaacctgtgggtcatgattccgttcgtgcgcaccctggaggaaggccgcaaggtcgtcgaggtgctggaacagaacggcctgaagcagggcgagaacggcctgaagatcatcatgatgtgcgaagtgccgtccaacgcactgctcgccgacgagttcctggagatcttcgacggtttctcgatcggctccaacgacctgacccagctcagcctgggcctggaccgcgactcgtcgatcgtcgcgcacctgttcgacgaacggaacccggcagtgaagaagctgctgtcgatggcgatcaaggccgcacgcgccaagggcaagtacgtcggcatctgcggccagggcccgtccgatcacccggatctggccgaatggctgatgcaggaaggcatcgagtcggtgtcgctgaacccggacaccgtggtcgatacctggctgcgcctggccaagctgaaggccaacggctgatgccgtaatgggctgacgtcgctttcatcgacgtccgcacatactgctgccgcacgcaagccccgcctctgcggggcttgctgtttctggcgtccgtgcacgccacgcgcacctcgcgcctgtccctcagcagcaaaggaactcccgcatgatcgccgccgcccgacccgcccccgccgcaacgccctggttccactcgctcgacttggagcgcctgctggaaacctacggcgtaccgttgctggccgcgatcgtggtgctgctggtcggcctgtgggtggcacgacgcctgtccaacgcgatgccgcgcgctacggctcgcatgggtgtggacccgatgctgggcagcttcctgcgcaacgtggtgtatgccgcatcgcttgtgatcgtggtggtgctggcgatcggcacgctgggcgtgcagatcaccccgttgctggccgtgctcggtaccgctggcctggccgtcggcctggcattgaaggattcgctgtccaacatcgcctcgggcgtgatgctggtgacgctgcgaccgttccgtgtgggcgatgtggtcaccgtggccggacagaccggcacggtgcgcgaagtgcgcatcttccagaccgtcatcaccggtgccgacaaccagcacaccaccattccgaacacgctgatcactgccgcaccgatcatcaacctcaccgccgaaccgacgcgccgcgtcgaactggtgatcggcatcggctatgaagacaacatccagctggcgcgcgataccgcgctggcgttgatgaaggccgacccacgcgtgctgcagacaccggcaccggacgtggtggtgtatgagctgggcgcgcacgccatcaacctcggcatccgctgctacgtgaagtcggccgactggttcggtaccaaggtcacgctgctggagcagctgaagctgggctttgacaaggcgggcatcaacatcccgtacccgcagcaggacatgcacctgtacctgcacggcaaggatggcggggtgatagaggctgacgcgctggtgcgcgacaagccctgatccatgccggtagtgccgaccaacggtcggcacccacccatcggcgatacgacattggaatgccggccagcggccggcactacccctcgcccactggtagtgccggccgctggccggcagcgtccaggatcaggccgcgacgctctcttccagcgtcggataatcggtgaagcccgccgcgccaccgccaaagaatgtcgcacgatccggcggattcagcgccgcaccggtacgcagtcgctccggcaggtccgggttggcgatgaacggccggccgaagccgatcaggtcagcccagccttcagccagtgcctgctcggcgcgttcggcggtgtacttgccggcgtagatcagcgtacccgggtagaccatgcgcagcgcctgcttgaacgccaccggcatcaacggtgcatcgtcccagtcggcttcggcgatgtgcaggtagcccacgcccagctcacccagcaggtgcgccgcggccagataggtcgcctgtggcgtatcgtccaccgcgccctgcaacgtcgtcagcggcgccagacggacaccgacgcggtcaccaccggctacggccgtcaccgcctgcacgacctcgcgcaggaaccgcagccggttctgcaacgcgccgccatagccgtcggtgcgccggttggcctgcgagtcgatgaactggttgatcaggtagccattggccccgtgcagctccacgccatcgaagccggcggccagtgcattgcgggtggcctgtgcatagtcggcgacgatgcccggaatctcgtcttcgcgcagcgcgcgcggcatcgagtgctggatcatctcgcccacgcccgcttccgggccagcgcctgcagggtcgacaaacaccttcacgccttcggccagcagcgccgacgacgacaccggggcggcaccacccggctgcagggccacatgcgagacccggcccacatgccacagctgggcgtagatgcggccgccagcggcgtgcaccgcatcggtcacccggcgccagccctgcacctgttccgggctgtggatgcccggggtccaggcatagccctggccctgcgggctgatctgggtgccttcgctgacgatcaggccagcactggcgcgttgggcgtagtaggcggccatgtccgcggtggcgacgttgccgtcggcggcacgcgagcgggtcatcggcggcatcacgatgcggttgggcagggtcaaggcgcccaggcggtggggagtgaacaacatggcggcgatctcttgcgggggggactgccgcaaaggatggggatgccagctgccaggcaacaggcatgtactggcaaaacaattgttcccccaaggcaaggatgaccggccggggggcagagccccttcctgcggaacgggatccgaccccgcgcgcaaccggggtcggatccctttgcaacgcaaagggctccgaccccgaagccggttacagcgtgggctcgatcagcacgccgccatgcgccacgcggtcatagcaggtgcgcaccacatcttccccgtacttcagctcgagacggcgcacgatgaagtggccgcgcgccatgtcctggtagtagtcggtgaacatggtattcagtgttgcacccgcggccgcaccaacgatcggcaccgcctgtgcggcaaatttctcggtaaccactacgccgaagcgcgccgccaccttctccaccatcttcgccagcagcttgccagcttcctttggcgccacgcccagggtcaggtcgcggccggtcaccacgcgcccggccagctcggccgacaggtggcgcatcacatccgtggtgaagccgcgggccaggtagtagccggtctcgctggcatcatcgcgcggcgagttgccgcccaacgcgaacacctccaggcacgcctggcgggtgctgaactcggacaggtcgaagccctcgctgcgggccacgtcagccaccgcacgcatcatgatggtggtcgacaccggcagctcgatgaacaaggccgcgaagccgaaggccccaccgaccgcgcccgaggtggccgccgccagtttgtgccagcgggtggacgcccccttgccgggggtgttgtccatgctccacagcgcggcctgcgccgatttgctcagcgccgcctgcacagcgccgtggatgcggttggagaccgagctgggcagcgccttcaccgcgaactccagcggcgtgccgaccaggttggccatgcgcgcggtcagggtcggcgcttccagcagggccaccgcgcgctgcaggtcggaccagtcgcgggcgtcatgggcgatgtcgcgggggagcaggatcggctcgttcatggcgccgatcttagcgccaggaagttgaacggttcgtcgcggggtacgacagagggggcagagccctttccgcaggaaagggatccgaccccggcgccttgccggccagcggccggcactacccgttggcgcgtcatccgatagcgccgggccatgcccggcgtcgttgttcaggcaaccggcagccccgacagcgcgcccatgaactggcggtagtggcgcagctcagcgatcgaatcgtgcacgtcgctcagcgcagtgtggttgctgttcttgccgacgccggcggccacgctcggcgcccaacgcttggccagttccttcaccgtggacacgtccaggttgcggtagtggaagtacttctccagtcgcggcatctggcggtgcaggaagcggcgatcctggcagatcgagttgccgcacatcggcgacaggccggccgggatccactgcgccaggaagttcaccgtctgcgcctcggcctggcccagggtggtggtgctgtccaccacgcgctgccacaggcccgagcggcggtgctggttgcggttccactcgtccatcgcttccagcgtttccagcgggtggtggatggcgaattccggcccttcggccagcacgttgagctgggcatcggtgaccacggtggcgatctcgatgatcgaatcgttgtcggtatccaacccggtcatttccaggtcgatccagatcagtcgctcgttggccgcgccgttgtccgccatgtgtcgcctcgttgctgggcaggcgcgcggcctgccggtgatggaaagaggcgcccatcataccggttcgccccctcaggcctcgccggcatggtcttccagcagcagcggcggcttgccacgcttggcacggaaatagttggtcaggcgcatgctggcctccttggccagcaccccaccgtggatctccacccggtggttgtggcgggcatcgcccagcaggtcgaacacgctgccgcaggcgccggtcttggggtcgctggcgccgtagaccaggcgggcaacgcgtgcatgcacgatggccatcgcgcacatcgcgcacggttccagggtcacgtacagggtgctgccgagcagccgatgattggccagccgcgtgccaccggcccgcatggccacgatctcagcatgcgcactgggatcgtgcgaagcgatgttgaggttccagccctcgcccagcagctggccatcggcgcccaccagtaccgcaccaacggggatctcgtcgtactcgcgctgcgcacgctcggccagcgccagcgcatggcgcatccagtgttcatcggcgtcgtgcaccggtacacccagggcgtcggtcatggcggttctcgcgtgtctgcagggccaggatggccgccggggccgcattgtacgcccgcggccgtgcaggcgccgctaacgcgtgtcgaagcgctcgcgggcagcgtccagcgccgggaaattgtgctcggcccaacggtccagggcggacagcgtgtcaaccagtccacgtgcgacctcggtcagccggtattccacatgcagtggcttgctgcccagatcacaccgctcgaccaggccgttgcgctccagctgccgcagggtctgggtcaacaccttctgcgagatcccttcgatcttcctcagcagcgcgccattgcgttgcgggccctgcgccagcgccggcaacagcagcatcacccacttgccggagatcagcgccagcgcatcgcgtgccgagcaatcggcggcatggacatcgcccgggataggccatggttacctcaaggtgcgtaattgccggggcataccggcgccgcgaggatggtcgcacactcctcgaacacctcgccccatgcgcgccctgatcctgcttgcccatcccgaaccccgctccttcaacgcccacctggccgcgcaggccgcggagcagctgcggcatgacgcgctgcaggtggacgtggtcgacctgtatgcagagggcttcgatccgctggaagcggcccaccatcattcaagtcgcctgcagcccggccgtttcgatgcccagcgcgaacaacgccacggcgccgaacagggtcggctgcccgccgatgtgcagcgccatctgcagctgctgcaggccgcggatctggtcatcctgcagttcccgctgtggtggttcgcgccgccggcaatcctcaagggctggctggatcgcgcgctggtttacgggccgatgtacaacagccgcctgcgccacgagcacggcgccatgcgcggcaagcgtgcgttgctgagcgtcaccaccggctcatcggcacgggcctgcgccgtcgacggccgcgagggagatacccggttgttgctgtggcccttgatgtacagcctgcgctacgtcggcttcgacgtgctggagccgcatctggtgcatggcgtgcgttccgggctggcagcggagcgcgtgcaggcacacgacgaggcattggctgcagcaacccactactaccgcgaacgcctggcgcaatggccgcggtggcccaccgtgcccttcaacgacagcggcgatttcgaggatggcgtggtgctgcgcgcggaggccactgcctacagccccttcatccgccatcgcaacaccggatgaatccacgcctgcgcgctgggtcgggacgcgccatactacgcgctctttgcaagcaccttggtgaacccatgaccaccctccgtccctcgcgcgccgacgacggcgccgccctcgtcgacctctggcgccgcgccgtcgacgccacccacaacttcctcagcgccgacgaccgccaggccatcgatggcgaagtcgccggcttcctgccgcaggctccgatgaccgtggccgtcgacgctcaggaccgcccccttggcttcatgctgatcgacggcacgcacatggaagcgctgttcatcgatccggacgtacgcggcaccggtatcggccggcagttgctgcagcacgcgctggccctgcatccgcagctgagtaccgacgtcaacgaacagaacgcgcaggccgtcggcttctaccagcgcatgggcttcgtcgaaaccggacgttcaccgctggattcgcagggccgcccgtatcccctgatccatctccggtacaacggctgacattcgacggatgttcgaggcccgccccgatcatcaggccgtggcctcgaatgccggcgagtactgcacctctccctgcgccatcggtggccgcaggcacagcgcctggaagtactctggcggcacacccggcagcaccaggcccggctcggcgcggaatccgaatcgaccgtaataggcgggctcccccagcaatacacagccctgcgcgttctgctcacgcaacgcgccgagcgccgcgtgcatcagcgccgcaccgatgccctgcccctgccagtccggcagcaccgagattggcccgaggccgaaccagccggtgctgccatcgctgatcgtcaccggcgacagcgcgatgtgcccgacgacctgtccgtccttctcggcgaccagcgaaagactcagctctccacgcgaacgcagcgcatccacaatgaactgctcggtgtggctgctgtgcggggcttcgcggaaggccgcctcggtgagtgcatggatgaccgcgtggtcttcgcgggtttcagggcggatcgtgcagttcaaggacaacacctttgatgaagtgatggacatgtgaatgatcgattccggtcacggattcagctgcgaacctgcgtcggcgtcagagccaacgcgacgatcggatgccctgtgcggcaagcgatctgccggcggcgcgccccgggagcgtcaaaaatccgtctccaagggtggcacagggctcccggcacgttccataatcgagaaacctgccacccaggaaggatagacggacatggacgcacgatgcaggatcgggccatgggtgtagcgcacctcgcacacaggggacggccgctgctggcagtgctcgccctcgtcctgctggcggcatgctcgccctacgccgatgcagagcgcgacgtcgccgcgggtggacgcggcctggccaaactcaacccggcgccgaagcaggcctatgaactggtgctgacagtgaaggatgcaccgggcccgttcgcggttgttgagggcgtggcccagtatgacgtgagcaactacggagactgcgggagggtcatctggtccaccggcacggccagccgcatcaccagccaggaaccggtggaactgcgcaggacgggcgagaacgaataccgcggtacgttctacctcgaccgcatgcaggaccaggactattacgatcgcggtacgtgccactggacgctgaccggcgttggcgcgatgttgcgtgccacgaccggcgaagctgatacgcgattcctgacgttcatcgacaagaagcgcatggacgcgggatcgccgttgactctctactatccgaagactgcttatccccgcgccgagctcgctgccaacttccctgccagcggcaaagaagatccgtcggcctacaaggaggaactgcgcgacgcgctgttctcgaccacaaccactgtgcggacgctcgcgccatgagctgccagcgccacatttccccctacacaccaggaggccgacattgcgccacaagatgattccgtgccttgctctgcttctgttgaccgcctgccatccggagaccgccatgaaccaggaacgtgccgctgctgaagccgatgtcgcccagggtgggcgcggcctcgccaagctcaaccccagcccgcgcaaggcctatgaactggtgctgcgcctgaaggacgccccgggcgatttcgcggtggtcgaaggtgtcgcgcagtacgacgtcaccaacgaagaccagtgtggctatatcgagccggccaccggcacggctgcacggattaccagccaggaaccggtggaactgcgcaaggtcgctgatggcgagtaccggggcactgtatacatcgaccgcatgctggatgaggattactacggtcgcggtgtctgcaagtgggagttcaccggtgcaggcgcgatgctgaaggcgacgggggccgagggcgagacgcgtttcctttcatttattgaagcagcgccattcgtgaaaggcgagaccgagactcgccactatcctcgttcggactatccgcgcgtgaacgagattcctgactacggcgcaagcggccaagaagaccccaccaagttccgccctgagctgcagaattcgctgttctcggcttcacttgaagccaatgaggtccgccaatgagcctcagcagccaagactatgcgggtatttccgacgacgtgtacaaggaccgtgcggtcggtcgacgcgctcccggcaaggaagagctcgtagcgatcaacgggcatgagtacaagatcctcgagcacgttgataatcgattgaacggttatcagggaacgatctaccagcgagtcgacaccaatgaaattgtcgtcgcacatcgcggcaccgaacagatcgcccgcgatgcgatcctgaccgatggtggcatggttgtcgcccgcaccaacgtccaggcaccggacgccatcgcgctgacccaacgcgccctggcctacgccaagaaggaggggcaggatctcggacagcgcccacccgaagtcaccgtcaccggccactctctcggtggcgcgctggcccagatcacctcgcaccatttcaatgtcaagggcgagaccttcaacgcctatggcgcggtcagcctcagctaccgcatcccggaaggcggcaacaccatgatcaaccatgtcatggcctccgatccggtcagctctgcctcgccgcacttcggccaggtgcgcatctacgccaagccggatgagatcaagacactcgccgcaaacggcttcagcaatcactcgttgcgcgcccttatcccggacagcccgctcgtcgcagcaggcagctcgttcggtgcgcacaagctgggcaacttcctcggtgacggctcggtgctgcaacacccggaaacgcagaagctggcaaaagacaacgccaggatgatcgaggagtaccgcgacgacgttgaatcactgcgccgtggtgtcacccgcgcggcgcgcggcattccgggcggcgccgtcgatctgtacgaccatatccgcggcccgctgcagcccggtgagccggcacgccgcgaagcggagaagaacggccatcacaccagcatgctgcgcatggacgacgccaaccatgtgggcaacccactgttcaacgacgcgatccgtggcgtgcacgcgcaggacgtccgcgtcggccgggtaccagacgtaatgagcacgcaactggccggcagcctggccgccgaaatgcatgcggcgggcggcaagcgcatcgacgaggtggtcatgaatgccgatgcctcgcgcagcttcgccgtgcagggccagggcggtgacccggcccaccttcgtgtgtcagtggatacggcggtggcgatgaacacaccgctggaacagagcagccagcgcatcgaccagcaggccgcaggtcagcgccttgcactggagcgcgaccagcagctggaacagcagcagaaccagacccgcagcctgcaggcctgatggacagcacgggagccggtctttccggctcccgttgtacatcggcactctggttcaggggctggaggccgccaccggcagcgatgctccggccgtcacgaacagatccggcccggaatccgggaatccaccacaggcgcgatcgccaggtgctaccggatcacagggccactgcgcccgcgcaaccttctcgcgcagctcgaagcgatcaccggtccagaccacgaacgcgatgtgctcacggttccagtcaccgtaggcgcgcggaccacccttctgcgccgactccggatactgcacgaaccagcgcatggccgggccgtactgcaacttgctatggtccaggctgatccgtccctcacgcgacagctgccgcgcacgatccgcttccgtctgctgcggcatgacaggcatggcatcggcggtcacatccctcggcgccgcgtccccgcggacctggtacacacgctggcccacataggcctcgcggcaatcacccgctggcacgcggaccggctccgcgccgtactcatcacggttggcgacctggtcgctgcaggtgaacggcgccgacaccaggtagaacgtgctgtcggcgtcgcgcccttccaacgagcgcacccagatgtcgcccatccgcacgatgaagtccgggcgctggccgtagcccggcaccgccttgaaccaggccttctgccgcacctcacgctcgcgccagctgcgcggcaggtggatgtcctgctcgggcagcgccaccagcatcgcagccagatgcgccggcatggtgccctggcaggcgccgatcagcaggtcgccctggctcgccagccgcccggccagatccaccgggcagcgggcaccgagcgcacgctcggtcgcctgctcgggcggcaacggcacgatggccaatgcaggcggtgccggcgctaccgccgggaccgctgactcgacgactgtaggcggtgcagccacaggcgccgccgctgcgggcggaacgggcgcaggcgccgggtccgcagccggcgccggctgcgtgtccaccaccggtgtcgcagggggtgtcgcggcagccggtacttcgggagccggcgccgcgacaacggcgtcggccgccgcgggcgctgcaacgggcgctgcccctgcaggcgcctcaacggtagcctcggcagcggggcgcgtctccacgacgggcgccgctgcctcctgagcttgtgccgacgctgcggcaagtccaagtgacagcagccagagcggcggcaggcgacgcacgggtgcattgcagcgggcagcggcgtggcgggcattcgggggaacgattcgcatgtggtgtccttacgggtgggtttccatgtcggcgccacagggcgccacgcgtcgtacgtaaagcgccagcgggcaccctgcccgccggcatcggtgttacagggatcgagaacgctgctcctgctcgcgggcgagcgcggccgccgggtcctgctgggcgacattggcagccaattgctggctgctctgcgccagcggctgctgcgccgcctgttcgcgatcgaccgatgcgcgcagcatggccggatcgcccagcgcgccctgcacggcaaacagcgtgcgaccgtcattgccggccaacaggtggtcgatacgcgacattccggccttctgcgcgctcagcgccagtgcgccggcggcattgtccagttcctgcgcgctgcgcattccgctttgcggccccatctgctgcaggtgctggcgcgctcccgagaacagcgtgtatcccggctcgcccggttgcgacatgtcgcgtcccgttgtgggctgggcaggcgcccccacttcgccacgctccaagcgcgccatcacatcgggggtcagcttctgctgccacacgtcaaaacgctgctggcgggcttcgatgccgttgagcgcgccattcagggcacgcgtcgcttcgcgcacgtcctcgcgcgccgcttccggcacccgcgtctgccactgccacacggcaatacggcctgcgtgctcgggttgcgcggccagctccggctgattcaccaggtccaggtccagcgccttgccggcacgctcgtaattctccttgccgaccagcggcagatagccacggccgtgatacttcagtgcatcaccgggcgcgtcattgcccatgcgcccgccatacatcagttcggccaggttctccggccgcccacgcagcgcctcctggcgggcgttctcaagcgcgccattgccattgcgccacgctgcttccaccgggatctgcgagatgccccgggtgaagttgaaactctcgttgagacggctcaagccacgggattcatgcccggcctgcgccatgaagttggccagttcccgggacgaagtcatgccggcctccgtggcctgccgcaacagcaacgactccctatcctgcgacacggtgaaactcctgctcgatcatcgttggatactcccgcctcctcacaggcatggcactcaaggcaagctgacgtcggcgacgacggacggatcgaaatcctcgaaccgcacccggccaagctcggccgcggagaaatcgcgcgtgtgggttgcttcggtttcggtgtccaccaccttgcgctgcacgccatgcacccagcacgcctgctcggcaggtgcataccggaaggtgtagatgctgctccagcgttcgcggctcccgccgttggtgatcacgctgaacgcgccgtcttcaatcgtcacgtaggcgaagggatcaccggcaatgccaccgcgcgttgagcacggcaccagcttgtcgttgcgtgccgccagctgccagcggcccgtggcatcgcccagcagcaacaacaggacccggttcggtccgtgctcgccgggcagcaagccctccggaggaggttggtcgatcaccaggagctggtcctggaaaccattaccggtcagatcgccgcgtacggcttccagcaggttcgcgccggacggaacgaacgccagggcattgtccatgtgcgtgccactccccttctccatcccctgcaactccttcaatcccgtcttgccagttcccgagcggaggccggaaacggggcgatgcctcgcacgtgccctgcggtcgccatggcggatgatagccccgagcccacggcaaccgcgatggtggcaagcgtcacccgcaccgcggggggacacagtcctcatggacggaaaagctcctgtgttcgatggcaccggcgcgtcgggattttgacgcgcacgcagcttacttcgaggaggcagcgctcgtcgaagggtgcttgggatgaaaagcgcacttgatcacataaaatcgggattggcgctgatggatcccgattccggatacaccatccatacgatcagcactccgcaattgttcgtgcgggcccggcgaagtgggtcacggctcggcgcacgctaccctcgccgcatgggctcccagcagcccacccgccgcggggcccaaagcgcgagcctcacctgtcgcaacgccactcaatagcgatcaaacaccggctgcgtgcaatccgcatagacttcatcgcatccgcccggttgatcgttcctgcacagtgaccgcgccgtctcaagtgcagctcccggcgtgggtcccgatccaataccagattgcccccgtcccgaacggccagcagggatggcccatgagacgcactggttgaagtacgtcatgttgagcgagcaatcaggagctccgctgataccacatttggacagcgcctccttctcagcggctcgccgggatctcatcccggttgaaacaccggcctcggacgtggccttcgagaccgcaatcgcgccccaggttttcacccattccccagcgggcgcgggtgccggcgcggacggagtcatggaagttccactagatccgggaattggtgcacacccctgaacaccctggccgccaatggggtacatccccggcggacagttgccttctgcgtgcgcggaactgatacctccaacaaacccggcggcagcagcaaccaacaccccggccagaccgcatttcatcatcccaacctcctgattcagtgatccttgcgccttccccgaggatggcgccgcggatgcgactcccggattaaaacaggtcgcagaaggcttgtagccctgctccttcagctgcccgccttttgatggcgacagctatcgcctgccactcattggactcgtttgatttggacatgtgaaattttgcaacggctcaccatccactcaacccttcgcccagcggttccggaggcacagctgagaggcggcaacatcaatacgccttgaagatcggctttgtgcaatccgtatagaaaacctcgcatgccccggcttggtcatttgtgcagcctttctgagcttcgcgctctgccacgtcgagtgtcggtccgcgtccaataccagatccaccctgacctgtccggccgctgggaactacccatgccgcacactgattgaagtaggcaagcataaccttgcaatcgttcgcacccgcggaagcacacttgccaagggcttcctgctccgctccactcttccttcgctgccctgtcgacacacctgcatgcgacgttcgcttggatgtggcaattgcaccccaggtggtgatccattctccagacggttgtggcggcgagacgggagcggtcaacccgccattgtttgctcccgggataggtgcacagccctgtactccctgtcctccgatcggatacatagcagggggacagttgccctccgcacttgcggacgagaatactagcgagagcattgctgctacgaccacttgcatcgaacgactagtcattttcactcactcgcgtccgatccaatttgcaaccatctgcaaacacgtatgaagtctccggggcacactggaaaaagtccaagccatatcagacgctgtaacgcatagcgcccttttctgacgtggcatgcatacctgttgacagatatcatgcggaacttggcgatcagcgatacgccctgaattccgacatgctgcaggccgagtaggcgacttcacacgctcccccatcattcacagaggcgcattccttcaacgcgagcgattgagcttcgtcaagtgtttcagcgctggcaacgattgaatttccggcagcctgtccgcccgagcggggcgacggatcggcgattgcggcgcattgatcgtgatagctcaaacgaatctgacacttgctccctcctcgccggacacatttgtcgatcgccgccgcttccgcagctcacttcgatttctgggatacaaggtcggcacggcgctaccacctatctgcgaatatgccatgaaggtacccagggtgccctggaagaacatcgcagccgttgggggcgcagtcagtgcgcacgatgattcgttcctgcagctcccttgcgcggccccgtagcctctgcgtcagactggatccatgccagacaggaagtacgtgcttcccccgctcagggtgatccacaaagcgtaccaattgaagaaagtcatgccgccgctgtgatcacgcgcccaaaagcggcgcattcttacagagcttcccgttccgcgcccttcttttagcggcatctcatggaaacactggcattcgaggtactgacaagagcgcaaccccactcacgctaatctgacgatcaattcccaatttttctgctgacctatctgaagccttatcaatacttccggaagacgggcaaggagcattcggaatagacgacggcgcactttccgcctccggtatcccgacaatgaccaatcgcatttctagcgacggtctctgcgtccaccgccgtatccagggagccctgcccctttcctgaggacggcacagcgaatgcaacgcattggttgtaataggtaaccgaagacttgcagtcctttgcaccctctgcggcacacttcttgatcgccgcagccaccgcgcgccgctcgctggactcattggctgcggtaccgacgagatttgacgtaggcgactcagccacggctccccatctcgtcaaccactcccccaacggctgagcaggagcgggagcagaggctgaagccgttccaccaactgcaccaggaattggcgcacaaccctggacaccctgcccaccgatcggatacgaccccggggggcagccaccctctcctgatgcggagtgtacgcataacaacaatacaacgagaactgtgtaggtcaaagtcgttcgcatcatggcctccaattcccgaagagttacgaattcattgttccagcattgccgcgctgcccactctgaatcggagattcagtggtcgcgcctccaaatctaggcgttgcatcttgaaccggaacctgacttgaggccctcgaattggtgggaaccggaggcatatacacccccccgctcgatccactagaacccggcggctgcccatttggacccggcgaggtcggcacggcgctaccacctatctgcgaatatgccatgaaggtacccagggtgccctggaagaacatcgcagccattgggggcgcagtcaggatcagcgtcgtcaggatcaggcccatgccgccctgctgcagcgccatgctgctcatgccctcggtcaggttcgaccccagcagtgcacccagcgcagacgcgccccagaacgaagccgccacgcgcgccaccatttccatggcaatgccggtcatcgcagccagcaccgccattgagaacatggtgccgatgccatagaacaaccatcgttggaacagggactttgtctgctcaaacagcaggcggaggatgaacagcggacttaaaccaatgagcaatgacattgcgatctggtacagcaacagcatgcgcctgctgtatcggccggtccaccgttaccaagccgatgatctgtccgcgacacgcgctgacctcgtctgagtacatctccaacaacttccgctggctcaccgaagtgattgcgaactcaatatagtagaggctcagccatcaaatcatccgcgcacaaacctgtcttctccccgaagcacgagatctgacgcttcatatgtagagtcccgaggtcctcagaacagattcaattctactgtttcagtaagtcctgaatatgggctttgtgcagtcagtgtaaaagaccttgcaggccccagcttcgtcatttgtgcagcccttctgcgcctcctgctccgccagctcaagtgttggccctcttcctatgccagatcctccccgccccgtctgtccacttggcaccacccacgcggcacattgattgaagtaggcaagcaccacttgacagtcctttgcacccgccgaggaacatttgccaagcgcctctttttccgcgccacttttctttcgctgaccagtggatacaccagcatcggaagtgcgcttggaggtggcaatcgctccccaagtggtgatccactcaccggaaggttgaggcggtgaaacaggggcggttgtaccaccgccagttgccccgggaatcggcgcacaaccctgcaccccttggccacctataggatagaagccaggcggacaattcccctccgccaaggcggaatcaatgctccaagcagttccaaccatcaggaccatcaatgcaggcaacacggatttcatgaggacgggattccattgacgacaattttggtcaatcaagtgttgccggagggagcattgccccgcaaacctgggcctgaagtagattgcacttcgccctgaccttggagtctaggtgtcgcactctggttggccaacacaccggtacttgagttcgaagctggcgccggaggcgtaaacataccacccgacccactagaacccggcggctgcccattcggacccggcgaggtcggcacggcgctaccacctatctgcgaatatgccatgaaggtacccagggtgccctggaagaacatcgcagccattgggggcgcagtcagaatcagcgtcgtcaggatcaggcccatactgccctgctgcagcgccatgctactcatgccctcggtcaggttcgaccccagtagtgcacccagcgccgacgcaccccagaacgaagccgccacgcgcgccaccatttctgcagtcacgagctccgctcatccggcatttggaaagcacctctttcacagcagtgcttttgaatctctgtccagttgaaacgccggcatcagaggtggccctcggaacagcgatggccgccaagctttcacccactctcctagagggcgcagcggggctcgccgccgtaccagcaactccgggaatcggggcacaaccttgaacactctgtccaccgattggatgcattccgggagggcagttgccctcggccatgaccggcgaacactaatgaaaccatcacaaccagcgaccgcatcaaatactgcattggactccctcagcacagcatcgaacggtgacagcggtgcgctcccggctggtgagccgttgatctggaggtagtgacggcggtgcgccggcttactccaaggtacggccctctaaagccatcaaacaatcgaacgccgcctgacaccctttaatacttgcggacgatcggcgcggaacatgccgagtagatcctcttgcaatgcgccccgcttgctgccttacagtcacgcatggcttgctccccggcgctctccacggtccccgaactggcgtactgtgtaccggtggatgccagttccgaggtgacagcatccacacattgattctggtaggtgaactcgatcctgcaacgtccaccgttctactcgcaattcgaaatcgcggccctcttcgcagcacgctcactgggctcacctacagctgcgcccccctccgaaccgctggatgagccagcgagtgcgctcaggtcctaacccattcacccaatggtctgggcggaggagtaggaatcgtagcgctgctcccagaactggctcctggaattggcgcgcagccctgtactccctgccctccaatcggatacataccgggagggcggttcctttctgcacttgcggaggagaatgctagagagaacattgctgcgatgaccgcttgcgtcaaccgaccagtcatgaacacacagccacgcccgagctcagtttccagccatctgcgaacatgcatgaagtctccagacgcctcggaacaacatcacagacatggcgaattcggcgcgagtaacgccaccttccagtgcagcatgaatacctgctgatacccgtcatgcagagcctggcaatcagcgatacgccctgaattccgacctgctgtaggccgagcaggccacttcacacgctcccccatcattcacagaggcgcattccttcaacgcgagggattgagcttcgtcaaatgtttcagcgctggcaacgattgaatttccggcagcctgtccgcccgagcggggcgacggatcggcgaccgcggcgcattgatcgtgatagctcaaacgaatctcacacttgctccctcctcgccggacacatccgtcgatcgccgccgcttccacagctcgcttcgatttctgggatacggaaacaccggttgccatcaagccaccagtggctggttttttatcctcagcgatggctccccagcgatgctgagcttctgcttggacacaccagtatcgccttgtccgcctgtcgcaatagcgccccacgttttgtgccaccggcctgtgggatggcttgcctgtataccgacctgctgcccccccctccagttccagcaacgggaatcggagcacaaccttgcacaccccgccctcccacggggtagaaacccggcgggcagttcccttcagcctttgcgattggcgtccatgcacagaaccggaatgcgccaagtgccaaatcgacacacgcaacggtgagccggttaaaaataggcatgcctctgcatctcaatcacctgatgcaactccacattcccggatcgcagaagacgtgcccgccgctgccctccgaggtgccatcaagctagccatgtccttggaagatcataacgtccctgcgcacgccgccgtgcaaaacagagcggtcagggtcggcctcattctcagttgcagcagcgcagccgcgcccgaggcttctcggagccaagccgccgtgcgcgcaaattgcaacaaacagatagcgatccgcgtcattgcaatcatcccgagcacggccatttcagtacttcctgaacaagggctcggtgcaatttgcatacacgggagcacaggctcccggcttgtcattcttgcagactccctgagcagcccgctcggcatcacccggagtcggaccggtgccaattcctgacaggccatttccggtccttccgctcgggatgacccaagaaacgcactgattgaaataggtcatgctgaccctgcaatcgcttgctccgctggcagcacattctgagacggctttgcgctccgcctccttctttgaccggtgccccgtagaaacgccggcatcggaagtgctggcggataccgcaattccgccccaggtcttgatccactcacccgtaggttgcggaggaggaggtggagactgctgggcggcgccgccagacgccgcgccgggaattggtgcgcatcccattgccccttgcccccccacggggtagtaaccgggaggacaggctccgccttctgcacgtgcagaggaagctgaagctgcgatgattcccaaagacagcaggctaaagaaaatagagcgcatgaaacccctcaaatagacagcaagccaaagcaaaatcaggagttaccggacggtgcattgccgcggagccccgttgatgcatgagcggcctcatgattatgaatcttcggcatcgcgacttgattcgctgtggaagaaccactttcagtagaaggcttggcaggcgcatacatgccccccgacccactagaacccggcggctgcccatttggacccggcgaggtcggcacggcgctaccacctatctgcgaatatgccatgaaggtacctagggtgccctggaagaacatcgcagccattgggggcgcagtcaggatcagcgtcgtcaggatcaggcccatgccgccctgctgcagcgccatgctgctcatgccctcggtcaggttcgaccccagcagtgcacccagcgcagacgcaccccagaacgaagccgccacgcgcgccaccatttccatggcaatgccggtcatcgcagccaacaccgccatcgagaacatggtgccgatgccatagaacaaccatcgttggaacagggactttgtctgctcaaacagcaggcacaggatgaacagtggaccaaaaccaatgaacaatgacattgcgatctggtacagcaatagcatggcgcccgccgtaacggctggtccgccggtgcccagcccaatgaaccacattgcacgggtctttgcgctatccagcgttacgtcgccggcaacatccagcacacttaccgacgtgagcgccagctgcatataacccaggttcttgtcaatcagttcctcggcggtcgacttctttccggtcacgatataggtgatctggtcctgcacatcgccagtcaggaagttctgcagcttggtcccaaacatggccatcgacgtagcgaccgtaacgatcagtgccgcccgtgccatgttcgtcatcaacgcagccatcgagtcacggcttcgcccagtcacgatgcggaagccctggatgagcacccacagcgtcatcagcaccagggccatcgtgccgacccaggtcatcatccggctcaggataccgttgccgaaattggtgatctcttcgcgcagatattccaggatcagccggaagaagacgaagtcgcccacggaggcgaacaacgtgccgtgcaacagatcattgaacaccataccgtgcatcattccctgactcatcacatcacccgccccgcgtcggggccctgctggagtgcgttgcgcacgtgattcacttggtggagagcgcggccttcagcgcgccggccttgatgacacttccaatcgggttgcgctcgccccgcaacgcacgctcggccagattcttctgccgcccctgcaaggcagcgatctgctggtcgtagaccttgatggtggtctcccacttcttgaaggccttctcaagctcgaccgaggttgccgtattgttggagatatcctcctgcagtgcgccttcattcttgaacgcgttgcggatccgacgcagctgctgaagcatctgctccatcgccggcatggacatctgcacgacctcgacagtctcgttgtacttcttgttctcaagcacctggatgtaagagcagatcgcacgctgctgcgccccgatgtcaccgcccgggctcatgttcaacgctgccatcagaccattcatgctgatcatggaatcgccgccgcacttctcggccacgttccagttctcgggaatcttcgtcagcgcaggagtcggcggcatcaggggggaagcaatgatctgggtccagttctggagcttggacatccagttgtcgatggtcttggagtactgctgagccgtttcactccaacgctgcgcagtctgaagatattcctgaccggccttcatctcctgcatgaaattcatgatccagttgaatgggtcatagaccgtcatcgcctgcgcgggactggtgcctgtactgatggtcatgcccagggtcaacactgcggccatcatcggcgcgaagcgcctgcgtcgcaccggagtgcggcggagttcagttgtcatgggggtttccttgttcgtctgagcgagcgtcttcatgccgtctcctcctgctcggcccgcttcccggacccttttcgatgtttgtagaagtcttccagccactgctccggcgtgagctcgtccacggtgatccggttgcggactgcagcggtctgcaacacgcgatgcatgatgtcgatgttgtcggtcgaggccgagatcaccgacaggatgtcgtccatgccacgcaggttgagctggcagacgctggacgcatggccctgcttgaccaggaagcagcgcgagcgctcgtcgagcgcggtaaccaccttgaactcggcctcggtcagcttcaggccatccatgtaatcgctcttgctggcattcgggttcggcagcaggatcagggtggcggtctgttcgatcagggcggcggagatatcactcttcagtgcatcttccgggctctgcgttgcgaagatgcccagaccattctgcttacggatggtcttctgcttgttcttcgcgaattccttcaggccaccctcgccgtccaggatcttccagaactcgtccatcacgtagatcagcggacgaccatcgatcaacgattccaggcggtgcagcaggtaattgatgaccggcacgcgcacttcgggattgtcgatgatgtcggtgtagtcgaagccgatgatattggccttgctcagatcaacggtgtcgaccggattgtcgaatacccagcccagcgaattgcccgaggtccagcggcgcatgcgcgcgtagagcccatcgtcgcccatgttgggcaggctcttctggaagttggtcatgctgcgcaggtgcatcggcgtatcaagcatgctttccactgcgcggtagatgtcctcctcctcgcgcgcactgtattcacgcttgccggccagcaccttgatcaggtcggccagaaactgcacgttggcttcattgttctcgcattggaacgggttgaacccggtcggcgcgccgttctccagggccagatagttaccaccgcaggcgcggacgaaaatctcagcgccacggtccttgtcgaagaagaagatggtcggtgacggctcgtacttctgaacctggctgagcaggaagttgatcagcgcagtcttaccggtaccggacttgccgatcaccatggtattggcgatcgccttctcgcccagcgaattctccgacggatgggtcgcgtggaaattgaagtagtacggctggccgttcgtggtctgcagcgtggtgacgcagtcgccccacgggttgttgtgctgcttgccggtcgcgaagttgtgcagcggcgacaggcccaggaagttcagcgagctgacattggccaggcgggtgcgatagcgccagttggccggtagctgcgaatagaaggacgaggtgaccgccaggtcttccttggtcgacacgaaacccgcattggacaactcggcgcgcgtcgtggccacgttctgcgacagcttggcctggctgtcgccgtagaccgtcatgatgaagtggtactcgcccagcacgaaattgcccgacgacagctggtccatcgcctggtccagctcgacgatctggctgactgccttgtcaccggaggagatcatcatgcccttggtgcggtcgagcaccttgagtgcgtcctgacgccccatcgggctgaacgaatgggtgatgacgtactcgtagtccaggtacttcaggccattgaggatgcccgggtaagtcccctcggcatactccttgatgttcaggatggcgccgaagtggttggcaccattaggggtgttgatgacgaagtcaccggttttggccgagaacatgtgccggctgaccggcaggtagtccttgatcggtgccgaaagcaccggtaccggctcgtcgatgcgattgatcaggtagccgaacagctccagcgtttcagagaacaccacaccgttcttggcctcgtacatgcccaggcgatacggtgcgtaatcgcggatcacggcctcgacgttgccggccagctccatcagcttctcgatggcctgctcctgctcggcctgcaagcgctcgacattcgccgacttttccacgaagcgtttcccggcgacgaccgggcggtagatcatggtgaggtacagctcgttctgcatgatgcgctgggcggacagcatgcccatgtactggtcggatacatcctgattgaagcgctggctgtagtggctcttgcctttcaacgtacggcgacggcgaatgtcgtgcacccagaaggcgacattgacgaaatccggtgccctcagcgtctgcagcaggcggttgaacgtattgtgccggtgctccagctcccattcctcgcgaccaacgaacggcagtccttccagataccaggtcaacaggtagtcgccgcccgtggtcttgaccacgttcggggcgatatgcgtcgacaggggaatgaactcactgatggaggtgtcagggctgaacatacgactgcttccaaagaggtactgccaagaagtttcaacagacccgacggacgcttgcgccggcgggccggatccggacctcaatccattcgggccggtttgtcgcggtaatggttggggttgaatacccacatgccatcgtgttcctgcacgttgcggactttcagcttgaacatcaggcgcaggcccaacaggcggaagatcatttcgtcacgcttggccatctgccgcatgatgaagaccgccaccggaatggtgagcagaaaccagaagttcgtgtacatgctgagcagcagcaacccacctgccaccatgaagaatggcaggtagggaacgcccaggaacattgccggacgtgtgcagccgcggaagacgacgttcttatgcactgtagtactggacagcctgctggatcagcatggaggtcttgccctcgcaggtgccatagtcgtcacccagcagcatacgtgcgatctggccagcggcaccgatcagtacgccaccgatcaggatcggtgccacatcaccaatgcgcttatgcgcaaaggcaatctggtagccagcaaagatgacggcaatggtcaccacggcgatcgaggccatgttcagcagaccattgatgctgtcgaagaagccacataccttcttctcggtgccaccataattgacgccgccctgattggcgaagacctccggagcgaacagcgcaccaacgaagagggtggccatcagcagagtcttcagcgtgcgctgggcctggacgaggtcgagattggatcgcttcatggattgatttccttgttgatggactaacacaactgaatcgaccagccgggggactggccgcaccacgacttcgtcagaacacgaaggccgcatcccctgcgggaatctgctgcaccggcgcagcctgcaccggtgcgttgaatgaattgtcgccaccggcgacaggctggttgcgctcgctccagggccgcagcatcactggcccctcattgccggcgccagcagcacttggcagctgctgcggcatggccatcgcctgtgcagcaccctgctgaggcagctgctgcggcatgccaccggcctgttgctggggataggcgggcccttggctgggctgcgcctgaggctgcatcatcctgtccactgaacccagcaccaccttggacagcgcctggtcggcgagattcagcaggctgccccgcgccatcgcaccggtggacgggtacacgacataggcgcgtgcgggatcttccgacggcacgtacaccgggccattggactgcgcaacgatgcgggcctgcgccggagaggccagctgcggatgatgttcgaccttcaccgcgcggcgctcgccgcggctgaccacgtcgatcggtgcaacaccattgctggcaagcatctgcccgcggcgcatcgagtcatagaccttctgcacgtagccgtgacggaagccggtctcgaaattgcccgagtagtagcagctgaacgacttgccccaatcaccaccggagcgcttgtagcactcggcgaggatgcgcgaacccgcctgcaggttcgggcactgctggaaggccttctcgtaggaatccaggccgtatttgcccaggttgtagcgattgacctgggccagcccgatggagaagttgtagcccttctcttcaagcatgcgcaccgtcgccagcgcttcgtccaaggccttgggctggcgcaccagtgcgccgccgaccacgccgatggcgtagggattgcgcgacgattcgacgttgattacatgctgcatcacatccatcgagacggccatctccgggcacgccatcatttccagtcctggcagcatccttcagccctcctgcccctgggcacgcccaggattgaagtcgatgccggtgatgtagcgcgagccggcatgcgccttgatatgcacgacgatgtcgatggtcatcatcaacagccgcttgatcacgttgaattcaaggcccgagccttcggtcgaggccttgaccatcaatgccagctggtcccaggtctgctctggactgccagcgtggcaactggtgatcgaacccgggtggcccgatgcacagttgcgaatgaagtagaacgcttcatcacctcgcagctcggctaggatgatgcgttcgggcttcatgcgcaggcaggcttccatgcagctcttggcgctgacattgctggtgctttgtccacccttggaatacagcaggtgcaccacattgggttgggtcaggaacagctcgcgcgcgtcctcgatcgtgaccaggcgctcgttgtccgggatatgattgaccaacgctttcatgaaggtggtcttgccgctaccggtcgcaccggataccacgatgttcttgcggtacatcaccgcacgccggaagaactcggcgtactcgcgcgaatggcgcagctccagcagctcacgatcctgctcgctgatgctgccatcggtttccaggatctgattgaagaagccgtcttcgtgatactggctgagcgacttggtgtgcttggacggcagacggatggtgatcgacaccttgcctgcatcacatgccggcggaatcacgaactgcgcacgctggccagtggggaacgtgagcgacacgaccggatcggcatcggtgatgcgctggccggtgttgctctcgttcaccaccgccgtgcagaactgccgggcccgctcgaaggtcaggctcggcacgtccacccgctgccaccccgcccgggtttccaggtacagctcaccgggacggttgatgcagatttccgtcacttccggagacgtcatgtactcggcgatgcccagcacttcgtactgatagcgcaggaaatcgctggagacgagggcgaggggtgacacttcggcgtccatgatctttcgttgagttaccggcgggggtgcagcacgttggtgaagtcaacgtccttggcgacgtagacattcacgatcgtgccctggttgatcgtgacggttggcggacggcgctcgctgagcgcctcattggcaagtcgctccatggtgcgagcggttgcgctctcgtagggagagcgcacggcaaagccgttgctggcgaccgttgtcgattctggaccgtgctcggctgcggcgtacttgaaggcgtcagcgatgaggctgatcatcagcgccgacgcgatacggctaccccagtgcgcactgtactggccaggatgtcctgccccgcccaggccgtccgtaccagggctggacatcgccacgtcgatgccattcggcgtggtgatgcgatcccagatcacttccacccgcttgccgatcggaccaccgccgtaggagccatagatcttggagcccttcggaagcagcaggctgcgcccattgatcgagtacaccggctcggtcagcaggcacgatgtgtagccggccacgtcggtgatgatccgcgtttccagcacgcatctcaggtacgtgccacgaaccagcagcgcgtcagggctacggatataggcggcattggagacattttccacgtcggggccacgacggaccttctgcggctgggtctgaggatttgctgccgcctgcatggcagcgatcatcgcctggttgtagtcagagttctggctaccggacgacgcgcccgcgtcgcccccccctaccccggaaccgccgcccatgcgccggtccatcaacgtcggcccgcgatcttcttgtggcctactcgccgacggaaaaccgggcatgggcacttcctgctggggcgcaggcggcagcatcggaatcggatcggcagcagccaccggcggcgccggatcagctgcggtacccacgctcggcagctgtggtgtcgtcgcacgcgcctcttcccgcggcttgttctgctcggtcgcatcatcctgccccttgcggaacagcaggaagcccattgccatcagcagcagcacgatgccaccgaggaacagcagcgcctttcggttcagccgctgctcttcggccgagcgcagctgcggcgcggccgcgtcaagatccggcgccggctcggcctgggccgtgccgaagtagggattcgacggcgcgtccgcggcaccctgtgcgccatacgggctctggctctcgtcgcgtccgttgttcgggtcgtttccgggagtgttctgctggctcatttcttcacgttccttcgcaggccgacgacgaagtcgccgtggcggatgaccaagtacgggtaggtcccgtgcacgatcagcgtattgccttcaaccgtggtgttgaccacaaagtcctcaccgtattccgtttcgcgaccaaacaccgccgggaagatgccggtcttgtactccggcgagttcggcagtttcaggtaggtgaaacgaccatcgtcataggcgttgaccgggatcagccaccccatcttcttcgccttgctggtcgaataggagtagttgaagttgtactggcggtccttggccagttccgagctcaacaacggcttggcctcttcctcgaccgcttcctgggcgacgccgaacacggtgtcgttcggatagacgaaggcgatcttgtactgcacaccggcacgacgggcctgttccagctggcgccagtcggtggccaccaccttcagctcgaagatgtaggaatgggtctcggtgcgcaccatcatgttggtgtcgacgtcgacgttcttcggcttgaggtagaacacgttctcgcgacgggtcagttcccagccgctgctgaagccggtgctgtagtcgaggatcttctcgttcgggctcaactcgatctgggtggtcaggcccaggccggtgcgaaccggatagatacggtccttctcgtactcgtagtggtcaaccgcctgcgccatcgccgctgctgagaacagcaacgacaacatcgacagcagcgccagcgcgcctcccctgatatttcgactactcatcggttgcttgctccatcagcagttccggtggaattgttctgcgccggcctcatggccggctgtccgggcatggcctgccccggcattgcttgcccctgcaccggctgacccggcatgggttgaccctgtaccggctggcccggcacctggccgttgaccggagccgcgaccggctggccggtggccggatcgatcatggtggccgcggccggattgttgggatcgtagacgccctgtgcctgctgcgccgcctgtgcggcctgctgcgcctgcgcctgcatggcgccgtcatccggcaccggcacgccacgcgaatagtcgttgtcgactcggtactcggtgacctggaaggccagcggattgaggatgcgatcctgttcggacaacgccaggttctggttgtactcgaagcgcatcgtcaccagctggttgtcaaggtagctggatgctccggtccgcttgtccaacaggctgcgctggatgcgcaccgacgcaccgcggaagctgccgttcggctcagcccccagcggcgtgatgctcaggatcttgacccgaatggccttttcgcggccgtacatcacaaacgggttctgagggttacttcctgcgtatcgcatacgcatgctctgagcaaccgggctgctggacatcacgaacaccagttcccagtcacgcaggcccatcaccgccgagtcatacgattcgcgcgcgagcacgtactgggcgacgttgctgcgattgatcgcttcgttggtggtgatcgtctcgccctggaaggtgccactcaaccgcgcgacggtcgctgtgccggtgtaggcatcggccatgaccaggaacggcaccttttccttcagcggcagcatgtagtagtagccgcccgccagtgcgagcgacatcagcaacgagcctgtggcgacccaccatgcgcgccgctcgctgcggcgtgccatgtcggccacggtgatctcgtagctgaccgccttggcgaccgactgctcgaccttgggactattgccgggatccttcttgcggaacatggattcttccgtactgctgaaacatcaatgggcgtggcacccctgcgacaggcgcggggagcagcacgttcgatgatttcgaggtggactcaggtgccgctgttggaatcagcgccctgtgccgacgcggtcggcgtcgagccagcgctctgcacaacgatctggttgccaacgatggagacggagatgccctgcgctgcataggccgccgtcagatcgatcacggcctgctgagcgttggtggtgtcgatgctggagaccgcgccgtacagggtgaagtccgagctcaggcggtaatccagcgtgcgtccggaatccttggcccagcgctcgagcatggctttgagcgtgccatccatcggcgaggcctggtagacgtagctggagtacagcgggatctcggtgggtgccgcagcaaagcggttgaccggcttccagcggcctccgaaatcgggagcggacttggtggcgcaaccggccaccatcaacgccgccactgcggcgatggacattttcgcgataaacgcctgattcatacgggcttcactttgacgtacgaaaaagcagtcccgagcattggccccctggtcgtccggcgctgcgtcgcgcacgccggaatcggagcgacgcactgactggcagcacacctgctccggctcccctgcagccaacggctgccaaccaagtcgcggggccgccagacactgccgacgacacacccgcatacctcaccaacgtcgaaaccatccttgtttcatggcacaaactcctggccaccctgctctacaacatctgccatccatcacacatttctgaacgacatgcacagggtcgcacaaccacgcgtcaattccatgtcagacaagtctgaaaatccatgaacaaatgccaaattcttgaccgaaatcacgaattcacattcttaactacgaatggtgatcacaaattcagcgacgtgaattagacgttcagcatcggaacgtccaccttcggcagcagcctcgaggtgaagtagcgatccttgtagtaccggatcttgtcgcacttcaccgggtgaggtatcccctcgtacaggaacacctccatgtccggccccatcgccttcagctcctgcggcagcatcagcgcgcgccgttcctcggtgaagttgtgggtcttctcgcgggcatgggtgacgttcttcctgcgcaccgtggtgtagcccagcatgtccgaatagtcgttggcatcctgctgttcgcgcggcgcgtacaggatctgcagcgcgtggttggtgatgatcgtgcgcgagacttcccggccgtaggtggcgtcgagttgggacatgctctggatgatcggcagcaggcggatgttgtagccggccatgtaggagaccgccgaggcgatgatctccactttgccgatcgaggtgaattcgtccatcagcagcaggcactggtacttcaggtccgggttggacttgggcagttccttggtgttgaggttgatcagctggctgaagaacaggttgatgatcagccggctctcggccagcttgttgggctggatgccgatgtagatggtcatcttcttcttgcggacgtcggtcagcaggaagtcgttgctgctggtggccttgtccagcaccgggttgatccagggattgagcggctccttgaaggtgcccaggatcgaggcgaaggtctcatcggcctgcgacagcatgttggcgaacgccgaacgggcattggcactgaggaacggtcgctccgacagggtcttgaggtacttcttcaggtcggtgccgtcgccggaggacagacggtacaccgcaccgagcgtgggcgtgccggcgccgcccgggaaaccgctgctgcgctcgtcgtcccagttctcgaacaggtacagggtaaaggccatgaacgcattgcgtgcctggctgacccagaacttctggtcctcggccccgtctgggtacagcatcgcggcgatgctcatcaggtccgacacccggaaggccggatcgtcggagacgtagctgagcgggttccagcggtgcgtgcgccggtcctcggcgaaggggttgaacaggtagatctcctggccctggctggcgcgccagccgctggtcaggtcgaagttctcctgcttgatgtccagcaccaccagcgattcgccgtactccagcaggttcgggatgaccacgcccacgcccttgcccgagcgggtgggcgcggccaggatcacgaactgctggccatccaggcgcaccagcttgccgccatggctgccgaccacgatgctctggccggtcttcttgaacatgccgtgcttggccaggtcggcaccggtggcgaagcgcgcgtcgccgtgcagcgagcgcttgtccttcttcagcagcagcaccaggccggccaccagcagcaccagcaggggcaggccgaagcctacgtagcccgcccatttgatcttgcccacgaaaggcgcgacctgcggttggccgatggcgtggacgtactggtagtaggtgttccaggtgaacagctgggtgtccagccccaggaacagcaaggtcaagtagccggagaacacgaaaccaagcaacagggtcgccagcgtgatgatggcgatgagcagatacttcttactgggcaacacccgaatcctccatgatgcgcacgcggcgcgacggcctagcggtggcgccagcgcgacgccttcttccgcaggtggttctcgttttccagcccgggctcctcgccctcttcacgcaccagttgcagcaagcgttggcgcgcttcggccagtgatatcaggtcggtcagacgatccccatcgtcggcgacgaccgcatggccgaccacatcgccgggagcgtacaccggctcgtgggacaccgctaccagctggtagcggccacgggtttccagcacatgcctgaattcctgcatcgcactcctccttgtcggggcaacactgcgccccctgccccgccatcatgccggtggcagcgtcatgggcgcatccacaaccgctgcggcttctgcgcgaaactgtgcgcggatatccaaggagaccgcaatggactgggtagcacttgcccgtacgctggccaccgaggcccacgcggggcagatcgacaaggccggccagccttacatcggccatgtggcgcgggtggcggctgcggtgtgcggcgacgatgacgccgaagtggtggcctggctgcatgacgtggccgaggactgcccggcgtttgacgcgcggatcgaggtatttcccgcaccgctgcgcgaggcggtgcaactgctcaaccgcgatgcagcacccgacgcggacagctactacgcgcgcattgccgcccacccgctggcactgaaagtgaagcgcgccgatctggatgacaacgccgatccgcagcggctggcaatgctcgatgcggcgacggccgcgcgcctgcacggaaagtacgctcatgcccgggcggcgctgggcatctgagccggacgcgacgaggcgcggcgggccggcgtgtcaccgatcaaacgctgatttaccctgagtgctgctgctcctgctgcagtgcagcagtacaatgggcggctcccgccccccatcgcgcccccgcatgagccccaactcttccctggctgcgcggctgacgccccgccagcgcaccctgatcatcctcgccctttcactgggtggcttcgccatcggcaccagcgagttcgccagcatgggcctgatgctggagatcagccgcggcctgtcgatttccgaaacccaggtcgggcatctgatcagcgcctatgccatcggcgtggtggtcggcgccccgatcctcgccttcgtcggcgccagcttcccgcgccgcaagctgctgctggcactgatgggcttctacgcggtcggcaacctggccagcgcgctggcaccgaactacggcacgatgctggtggcgcgcttcgttgccggcctgccgcatggcgcctacttcggcgtggcgatgctggtggccgcggcgatcagtcccgcaggccagcgcggccaggcgatgtcacgcgtgctgctgggcctgtcgatcgcgatcctggtcggcaacccgctgacgacctggctgggtcagcagctgagctggcgcaccgcctttgccctggtcagcgtgctggccatcgccaccgtggcgatgatcgcgcgcttcctgctgccggacccggatgaagtacgcacctcgccgatgcgcgagctgcgcgccttcaacacgtcccaggtgtggctggcgctggcgatcggcgcggtcggcttcgccggcatgttctgcgtgttcacctacctggcaccgaccctggtgcaggtcaccggcgtggccgaatcgtggatgccactggcggtgggcgtgttcggcatcggcgcgatcatcggcaacatcgccggtggctggctggtggacaagttccacttcaaggccgccgccgtggtgctgctgtggtcgatcgtgatgctgctgctgtatccgctggccgcacagtcggtgtggaccatcggcccgatgatcatcactgtcggcaccatgggcgcactggcggcggtgctgcagacccgcctgatggacgtggccggtgaggcgcagacgctggcggcggcctccaaccacgccgctttcaatactgccaacgcactcggcccgtggctgggcggcatggcaatcagcgccggcttcagcccggccagtaccggctatgtcggcgcggctaccgcgatcggcggcctgctgctgtggtgcgtggcggtgatgctggacaagaagcgcagcaccgccgtcgtcggcagccactgaacattgcgccggatcgtcagttgctgcctctgcggcgacggcgatccggtcgcagcaacgctgtatcgccggccaccagggtcggccgcgccagctcaccgcgcttcacacggtccagcacccgccgcgaattggctgcacagtcgatgccgtccggccgcgcctggatgtcctcgatcagggccagcagatgcgcccggctctctgccagccgcagctgcaacgcttcgatgtcagccaccttctgctgcagcatcgtgatcaacgcctcatgctgccactggcccatgtccggtggcagcagggcgcggatctcttccaggctgaagcctgcacgctgcgcgcccgtgatcaactccagcaacagcaccgcctgttccggatagtcgcggtagccattggcctggcgctgcgccaccagcagccccgcgtcttcatagaagcgaatgcgcgacgccgcgaggcccgtgaggcgggccagctcaccgatcttcatctgcctgaatcctcgccatgggagtctgttgaccttcaataaaacttgaaggttagcgtagcgccattcccctgtcctggagctgtccgatgtcgctgttctcgcccctggcactaccctccggtgccatcatccgcaaccgcattgccaaggccgcgatggaggaaaacatggccgacgccgaccacgcgccgtccgctgcactgctgcagctctaccagcgttgggccgatggcggcgcaggactgatcatcaccggcaacgtgatggtcgatggccgcgccatgaccggccccggcggcgtggtgctggaagacgaccgccaccttgaccgcttcatcgcctgggccgaaacggcacgctcacggggcgcgcagatgtggatgcagatcaaccatcccgggcggcagatgccggccgcactcggccaaccggcactcgcgccgtcagccgtcgccctggagatgggcgcgctgtccaggcagttcgcaccgccgcgggcgatgaccgaggcggacatcgaagaggtgatcgcccgcttcatccgcagcgccgagctggccgagcgcgccgggttcagtggcgtgcagatccatgccgcgcacggttacctgctcagccagttcctgtcgccgctgtccaatcgccgcgacgaccgctggggcggcagcctgcacaaccgtgcgcgcccgctgctggagatcgtgcagggggtgcgcgccaccgtgtcgcccacgttcgcggtggccgtgaagctcaattccgccgatttccagcgcggtggcttctcgcccgaggatgcgcgcgcagtggtggaaatgctggcgccgctcggcgtggacctggtcgaactgtccggtggcagctacgaagcaccggccatgaccggtgccgcgcgcgaccagcgcagcctggcccgcgaggcctacttccttgagttcgcgcgtgagatcgccacggtggcaaccatgccgctgatggtcaccggtggcatccgccgtcgcgccgtggccgatcaggtacttgacagcggtgtggccatggtcggcatcgccaccgcgctggcgatcgagccggatctgccccaccgctggcagcagggccgcgacccggtgccgacactgcgcaccatcgactggcgcaacaaaccgttggccgccagcgcacacatggccgcagtgaagtaccagttggcgcggctgagcaggctccggcccacggcgccgggtgtttcgcccgtctgggcactgctgctggcacaggcggccgcaaagtgccggacccgccgctaccggcgctggatcggtgcacgcgcaggaggatactgagcgggcaggcttctcatcaccgaatcgatgcttcaccatctgcatgatcggcggcagcccgtcgccggtcgcaacacgcagaaggaaccctcgtggcagcaggaccaaccaggaaccacgaaaagctgctcgatgacctgctctcactgggccgcaactgggcgctggccattgccatcgcaggtgccggagctgcggtccattacagcgagtcggtctacgaagcaggcatctggcgcgacctgctgcccacgctctgcttcctggtcgccatcgtctggatcgtgctcagcatcatccgcttcgacctgaccatccagcagcacttcgagcggaaattgtcacgctggctcagccgtctgctgtatgtcgtgctgcttggcaccggcatcactgccgtgttcttcgtcaccgaactggcggacaacaatcacatcgcgcggatgtgcgactcggtggccaatgaacccggcagccgcatccacaggtcggccgagtgccagcggctgtaccagcatcgcgcggcgtaccggcagcgtctggaatcggccgagggtgagttcgactgaacgggcttcatcgcggtcttcgcgcgcgatgaacacatttcgtggatgtgcatttgggcacagtgcagccgacgccgcgctctcggcccgtaccggacccgcaatgcccccccatcgcgcacctgcccgccatgatgccatcgccttgcaggccggcatgctgggcagcgtgttgggcgtggcgctgttcaaggccatcgcactgtctgcgttggcgacgggttcgatgatgggtatcgggctatgggtgatggcctgcgcgctgctggcagcgtgggcgctcgcagcctatctggcctgcctggcactgagccggcgcgtgttcgtgctgatgctggtgctgtgcacggtactggtgatctgcatcgcctgacgccggcaggggccggactatcgcgcatctgttatagaataacaagtgcggttggtccgattgtgcatgcccggtgtcacggatttgaattccatggccatcccggcatcacccgaggcccccccatgaacctgcagcccccgctccgcgcgaccctcattgccatcgccctcgcatcgctcagcgcctgcgccacctatgacgacagcaacatgcatcaagcctgccaggagtcgccgcacctgaaggacctgccgcccgaggtcgctgcccgcgagagccgctgcaacaagggcatggaagtgtggtcgagcgagcgcaagggcagtgacaagccgctggacctgagcggaaagaagaacaatccctgacgaaggtgcgcacccggttgccgcgcctgtcttgatcgcgcccatgcatccggctgactgctccatcacagccggcgcgcgacgatgaggtctccccaccctgtcgagactcagatgccggacactgcccaccctgtcattcgcgcgttcgaggccgtgttcgatctatcgggcagcgtgcagcgcatcactgcgctcacggtcacctgccggcattgctcgtcgaccagctctgccagcgaagacaacctggtgcaacttccgggcggggcgttgttccgttgtgacgggtgcggctgccatcaaccggtcagccacgcccgcctgtcggactggcaaccggcgtcgttgctgggtatctgagggccgccacgtggaaatgactgcggaacagcggaaaatactccaggcaatcgccgctgcaaagccggtgcgcggcgatgccgcaacgtgggcggtgaccgccggatgggcggtacaggcggaagacggggatatcgatctgaccgaggctggccgggatgtgctcaccgcgcaggcaggtcgtaagggctagacccgccgatcaggccagcttcgcctcccttcgcgctgcgccgcgatagcggcaacctgctgaacaaggggtgcatccctgccacgtctacggcgaagtggcgaggcccttcatgccgagggtgtgcagggcgtcatgacatgcgctcggctatgctgcgccacctccctgcgccaatggcggccatgcatccttttcccctgccagtctccgcacctgatcagctcgcctaccgactgctgcaggacagtgactgggcccgctcggccactgccgcaagcgcacctgccgaacttcgcaccttgctggcgatgatcctggattcgcccgaacccctgtggcttgcctggggcaaggaagacaaggcgttcttcttcaatgatgcctatctgccgatgctgggggaaaagctgcacggcgcgatgggcaaccgtctggaggatgtctgggcggacgtatggccggacgtggtgcatgccgtcgacgacgcctttgccggcaccagccgcagcttcaagaacctgccattgatgatggatcgcgacggcacgctgcgcgaaactttctggacgttttcctattcaccgctgcgcgtcggctgcggcagtgtcgccggtatcctgtgcgtggtcagcgagcagaccgaacgggtgatcgagcgcgacctgcacagccgccaggtcgcggcgatcaccgagcaggcgcgggaggcccatctggaactggtgcgcgcccgcgagcagctgcgccagtcgcagaagcttgaggcgatcggccagctcaccggcggtgtggcccacgacttcaacaacctgctgcaggtcatcaccggttcggtggacatgctcctgcacacgtggccgtcagacgacacccggcgccgctacatccaggccattgccacagcctcggaccgcgccaccaagctgaccgcgcaactgcttgcgttctcgcgtcgccagagcctgtcgccggaggtcttcgatctctgcgaaagcgtgcacgcgctttcggacatcatcaccacggtactgggtgcacgcatccaggtgtcgttgacgttgcccggcacgccgttgccggtgctgctggaccggacccagctggacactgcattgatcaacatcgcggtcaacgcgcgcgatgcgatcgagggacacggcagggtgaccatcgaggtggagcaggtaaccgcggtgccttcggtgcgcttcgccgcgccgatgaagggcgacttcgccgcgatcagcgtgaccgacaccggagcaggcatcgaccccgccgtcgtcgaccgcatcttcgagcccttcttcaccaccaagagcgtcggcgccggaaccggcctcggcctcagccaggtgttcggcttcgtcaagcagtcagaaggcgaggtggacgtgcagagccaggcgggcgccggtacccgcttcaccctgtacctgccgctggcgcaggcgagagaaatgacggaacggccggcgacgctaccggggctgcagcatggtcacggtgtctgcgtgctggttgtggaagacaacgtcgatgtggccgaatttgccgtcggcgccctgcgcgagctcgattacaacgtggtacttgcgcacaatgcggacgaggccctggcggagctcgaacgggatgcctcccgcttcgatgtagtgttcagcgacgtagtgatgcctggcatgaacggcctggatctggcccgtaccatccgcagccgcctgcctgggcttccagtgatccttaccagcggctacagcgaactgttggcccgggaccctggccatggcttcaccctgctgcgcaagccttactcattgaagcagctggcctcggtgatgaccgaagccgggcgctgcgcgcaggccgtggtagcgtcgccctagcgggcggtcaccgcagcgaaccgaaccagcgttccagcgaaggctccagccccgacgtgtcaccgccagcatcgcaggcccaggcgacgataccgtcggggcggaccagcacggcgcccagtcccagcgtgtcgcgcgccgtggacatcacgcaggtgaccgaccgctgccagcgctcaatgatcggaccgagcggatcgccggtatcgagccccagcagcacgccctgccctgcacgcagcagctctcccatccgacggtcatcagccagttggacgtccggtgcgcttcggccaacccgcggatggctgccgtcgagcaccggtggcggtgctacaccccacagccgctcggcgagataggtggcaccgtcgcgggtcgcggccaggtcggcgatgaccgccgccagcgcgcgcgacccggggcctggccgcatcaacgccacctgcgcacgtgaccagtcgagcacctgggcgccgatcggatggcgctcagcctgatagctgtccaacagcgactctgccacatcacctcgcaccaccgcggccagcttccaccccaggttcatcgcatcgccgatgccgaggttcagcccctgcccgcccaacggcgaatgcatgtgcgcggcatcaccggccaacagcacgcggccgctgcgataggccatggcctggcgcgcggcatcggtccatgtggtggccagatgcaacgccgtgatcgttgcctctcgcccggagacacgccgcagcagcgcctgggcggtgtgccggtccagcggcgtgcgatggccggcgccaccgtcgaaatcggccagcgccagcatgcccggcggattgaaattgcacatgccgtgttcggtgaactgacgccccgggacgagcaccgacgggtctgccagttcgacctgcagcgtgtgcccggtgaactccggcgccgtccctgcgaacacgaaccccgactgcttgcgtaccgtgctgcgggcgccatcgcaaccgaccagccagcggccccgcatcagcccgcgaccggtctggacctccatctgtgcttcgcgtgcgtacaccgcctgcaccgtgcagccacgctcgatctgtacaccaagtgacaccgcacgctcggccagcaccgcctccagcgactgcagctcgaccgccatctgggtgggcaccggcgtcggcaggcgatggcgccagcgcgcactgtccacgttgtccagcgcaaaaggaatgccggcgaagtggccgcccagcggccgcggttgcgccagccaatgggcggtgccgggcggcggtgcgccgttgtccggcttcagcacctgactggcggcaaccgcatccagcaggccacgtcgatccagggcctccagggtgggcgcgttcaagccgcgcaagccaaagggcaggcgtttcaagggtgtctcgggcgacactgcctgctccagcaacaggaccgaacagccggcctgggccagctcgcaggacaggaacaggccgaccgggccggccccggcgatgacgacgtcgtacaacatgggatttccctgtgagcgccgggccggcgccctggcgacgccaatgttacactcggtgtacttttccacaagtgaaccgcccatgatcccgccccggggccgccgcgagcagcgcaagaccgagacccgacagaccatttcggacgtcgccaccgaactgatcatccgccgcggcttcgaagccgtgtccatgtccgagattgccaatgcggcgggggtctcgcgcaagacggtcttcaattatttcgccagcaaggaagacctggtgttcgaccgcgatgaggaggcccggaccctgcttcgcgaaggcatggcggcgcgccgtggcatggccccgctggccgccttccaatcgctggtgcgggagctgctggacagcggccacccgctgttacggatcaactccggtgcagcggccttctgggcaaccgtggccgacagtccggtgctggtggcgcacgcgcgacggctgcaggcacagctggcccacgacctggcccggctgatggccgacgcggccggtcggcccgcgcaggacgcggaggcacgcctgggcgcagccatgctgctggcgtcgatggtggccgcctatgagagtggactggccagccagcagaggggcgaggatccgcgccaagcgatgctgcagctgatcgtgcgcggtggcaccggcgtgctggtggccttggccggcaccccatataccgacccgggcctgcgtccatagcgcaatcgggggataggtcacgaagcgttgcaaatgctaatctttctcatttgcagccagccccgaccccctcatgccgcttccaaccccgctcaagcacgccctctgcctggcgctgcccctttccctggctacgcctgcactggcctccgaggcctccgctgacaccccgaaggacctggacaaggtcgaagtccgcggccgcgcgcagaccctgtaccgcgccaacgatgcggccgtcggcacccgcaccgataccccgttggaactggtgccgcagtcgatccaggtcgtgccgcgcgagctgatcgacgaccaggccgcgcgccaggtcaccgatctgtaccgcagcatcagcggcatcagcttcttcagctatgccggcgtcaccctgcgcgggttccgccaggagaacgttctctacgacggcctgcgtggtgatccctatgcgggcttctcggtgccgcaactgttcaatatcgaacgcgtggaagtactgaaaggtccggccggtgcgctgtacggcggtggtgatgcgggcggtgtcatcaactatgtaacgcgcaagcccaaggcgcgcgccgaacgccgcatcgagctgcaggcaggcgacaaggacttccgcgccggatcgatcgaaggcaccggccccttgaatgccagcggcagcattcgctatcgcgccggcctgtatgccgacagcgagcagggcgtgcgctggaatgccgacagcgaaagcgtgatcggcgatgcctcgctggccttcgatgtcggccagaccggcgagctggtgctgcagttcaccgacatcacccagaacctgggcggcaaccgcctgcgcggcgtgccggtgaacgatgccggcagcttcctgaccgaccgccgctggaaccacaacgaggccagtgacttcctcgacatgcgcgccaaggtcgcactggcgcagtatcgcttcgcaccgcgcgacaacctggacgtggatcttgctgcgcgctggttcagcaacaacgagcaccagatgtaccacgagccgatggggctgattgatcgtgaccgcgacggcgtggccgagtggatgacgcgccagctgcgcaaccagatccgtgacaacactgccttcaccgccagcggcaatgccgtctggcggatcaacaccggccgtatcgaacacaaggtgctgttcggcgccgacgtgtaccagctcgacgccgacttcaccgcgcagaccgccaacagcgccgacctggcacgcggcgccggcccggtgcgcggcatcgacctgttcaacccggtctatggcgcgagcacctggcatgactacaacctggccgccctgccgtggcgcagcaccgccacccgcagcaagcgctacggcggctacctgcaggatgagctggcactgggcacgcgctggcatgtgctggccgggctgcgctgggatggcttcaaggatcaggaccgcatgggtggcggcagcgtggatggcaacgatctcagctggcgcctgggcagtacctttaccgtccgggacggcgtgaatctgtatgccaacatcgccagcggcttcgtgccgcagagtgccaccaaccagaacccggcggccggcggaccgttcgacgcggagcgcagcaggcaatgggaagtcggcctgaagtccctgctggccgaccgtgtgaccctgaacatggcggcctaccgcatcgaccgcagcaacatcgtgcaggccaccggcgaggtgatcggcggggtaaaccaactcgctgcactgggcctggtacgcagcacgggcatggaactggacctgctggccgacgtgaccgagcgctgggtggtgaacctgacctacgcctacaacgatgcacgggtgaagggtgccggaccgaacggcatcaccaatgcctccggcgaccgcttcgccaatgcgccacgcaacaagctcggcgtgtggacgcgctacgacctgccgtcgatcaactcggccatcggcttcggcgccgaccatgtgggcgagcgtgtcagcctggatgggcaggcggtcaaggcatacacggtattcgacatgagctggaagaccacgtggaagcagtggcagttccaggccaacgtcaagaacctgttcgacaaggtgtacgcggccagcggcttcatcgagcgcaacgggcatttcccgggcgagccgcggcgggtgtatgtgcaggcggcttacagcttctgacaccgcgcagcagagcgtgccaagggaggtggcaacccacctcccctgcccaggtcagtgcgagcaggacaccagcatcgagcgggtggccatctgggtagaggtgaagccgttcctgtagcccaccgcgatggcatttccttcatcgccatccttgctgaagaccacatagccgcctgggcacatctgcccggccttttcgtagcagccactccaggaactggaaccgctgcagtcgatggaaacaccacggcggccatcgggggtgacggtcattctggcagtggtgcagccactcaaggcggcaaccagcaacagcgggacgaacaacttcatgggcactccaggggttggggatcagcgaacgggcgccaaggctggagtgcgcggattgcgcgaaccttgcgccgggcggcccgcgccgcagcgggtgttgcggcgtcaccggcaggccccgaaggaacgccatgttcacgcaatgttcctgtaatacggtgccggcgcttgccgcccgccttatgcctccttcccgcctgacgcctgccgatgcacatcctgctgatcgaagacgaagccgaactggctgccaccctgaagtctgccctgcagcgggagcgctacgtcgtggacctggccagcaccctggcactggcccgccaagcagcactttccggatcacacgaccttgtgctgctggaccgcaccctgcccgatggtgacgggctggggctcattcccgtgctgcgcgggcgcaatccgggggtgccgatcatcgtgctcagcgcactgggacagttgccggaccgcatcgccggcctggatgagggcgccgacgactacctggccaagcccttcgcgctggaagaactgttcgcgcggatccgcgcggccgggcgccggccgagcggcatgcaggtggagccggtgagcatcggccggctgctgttcgaccccacctcgggcgaagccagcgtgggcggacagcgactggagcttccgcgccgcgagatccgcgtgctggcggccctcgcccgccggctgggccgcaccgtgcttcgcgaatccatcgagatggcggtgtacggcttcgacgacggcatccattccaacacgctggactcgcatgtctcacgcctgcggcgcaagctggccgacgcggatgcgggggtggaaatccatgccatccgcggtgtcggctatctgatgcgggaaacgaagtaatggcgcttcgtccctcactgaagcgcccgctgatcgtcaaaaccctgatctaccagttgctcgcactgctggtggccttcttcgcattgctgatggtgctggtgcgtgtcgacagcggcggctactacaccatccagaccttcgccccggtggcggcagaggccgttcgtcgggacagcaagggcgagctgtatgtgcaacgcacaccggcgctggacgagctgctgaagatcgtccccggcgcgtggttcatcgccgaggatgagcagggccaacatgtgacattcggccacgttccgcccgcctacgcctcgctggtcggcgccctcgacggcattccctatggcgacctgcgcggacgcggccgcaacgacggcctggccgtggtgatacgccagcacagcggtccggccggcaagctgaccatcatggcccatggcgaaaccgattcgctgacctggcagatggcgctggccgcacacatcatcaccctgccgatcttcctgctgctgggcctggccaccatcatcctgaccccgatcatcgtgcgccgcgccctggctggcgtggagcgcatcgcgcaggaagcccgcaacatctctgccagccgtcgcggcatccgtctgacagagaccgccgtaccggtggagatcgcaccgctggtgaccgcggtgaacgaagcgctggaccgactggacgaagggcacgaacggcagcgccgcttcatcgccgccgccgcccatgagctgcgtacaccgatcgccatcctgcgggtgaagatcgatgccaccgacgattccacctcacgcagcctggcggtggaagtcgctcggctggcaacgcttgccgagcagctcctggacctgcaccgcatggaagccgatggaccgaaggactccctcaacctggcccgcgtggccaagcgggtcgtcgccgatctggcccccctgctgatccagtccgacaagacggtcgccgtggcagtggaaccgaacttcccggtgctgggcgagtccggtgccatcgaacgggtgctctccaacctggtactgaatgccgccgagcacggtggacgccatatcatcgtgcgcgtgcagggcagctgccttgaggtggaagacgatggacccggcattccagtcgaccagcgcgaacgcgtgttcgagcccttccaacgcctgcggccccggcagacaggcgccggattgggattgaacctggtgcggcaggtgatcgaccgccacggcggccacgtcacgattctggatgcgcccggtggtggcgccctgatccgcgtcgagttcccctcgcatccaggcgtcaccagcgcattggcgccggagtactgagcgcatcgcttccacgtggatgactatgcgcggatgactactggctgtccgcgcgccaggactgcggttgatgcgcaaggttgcggcaatgttcgctgcccagcatccaggtgagcagcacagcaggtgctgcgtccggaactgacaggaagcctgcatgtgacacagggagctcctccaccgccctcttccacccctgccccgccgcctcggaatacgcccagcctgaccgccgcagcatggaactgccgcgcgcatgcaggccgcgcgcgtgggttggaacactggccgcactggctgcggatgattcccgaacgcgagcgggccggcgtgctgatccgcctgttcgccgcgctgttcctgctgctccccggccttgcgctggtggcttccgcgtatcggcacgcgcatgcaacggccactgccgtgctggtgttcgtcgccgtgcatgccgcactgcacatgctggccgtgtggcgaggggctgcactacgcccagctcccccgctgctgcggaccctggatacgcgcgcagccgccgtgatgcttgctgccacgttgatgatcatcgcgatcgtcgccgccaccgcaacgctgccggttgcggtctgcaccgtgctgctggtcggcgcgttgtgccagctttcgaccctgcccacgccggcgcaacgcctccgccacgtgctgttggcgctcggtagcatgatccagttcatcgcgatggcactgctcacgcagggcattgcccactgacacgcctgcaccatcgcaaggttcgcgcaatccagcgcatcgagactcgaccaccatccacacctgtcaccccaggcgtgcattccaacagtctcgaggatccacgatgccctgtctcttccggatgccgcgccgatgagcgccacaccgcgcagccgccgccgtgtgcagatcattgctgccgcactcctctgcacaacgttggcactcttcgcctggctccggcccgtaccaccaccgaagctgcaggtggcaccggtaacccggggcaacattgaacaggtcgttgaagccactggaacactgaagccctcgcggctggtgagcgtgggcgcgcaggtctccggccgcatcgaggccctgcatgtgaagctgggcgacaaggtgaaggccggcgatccgattgccgatatcgattcgcgcacccagcgcaacgcattgctgagtgcgcaggcagcacagcgcaccgcgcgcgccaaccgcgatgcgctggccaccgacctgcgccagttcgagctgacattgcatcgacagcagcagctggtgacctcgcagttggtggcacgcgccgacgtcgatgcggccaaggccaaggtcgatgccacccgggaacagatcgccgcgctggaaggtgagatcgtgcagcggcagaccgacgtggatatcgcacagaccaacctcgagtacacccgtatcaccgcccccaccgacggcaccgtgctggccgtggtggcgcgccaggggcagaccgtgaacgcggtacagagcgcaccgaccatcgtgatgctgggcaaccaggacgtgatgacggtctacgcggaaatctccgaggcggatgttgtgcacacgtccgttggtcaggaagcgtacttcaccattcttggcgacgcgggacgtcgctacaggagcacgctgcgcgacatcgccccggctccggaatcgatcacccaggaagacgcctccgcccttgcttcacccgcgaccggcggtggcagccgcaccgccatgtactacaacgggcagttcgacgtcgccaacgccgatggccgcctgcgcagctacatgaccgcgcaggtgcgcatcgtgctgggtcgcgccgacaacgtactgacgctgccctccgctgcgctcggtgcacgcgcggccgatggcagctacagcgtacaggtgcgtggcgcggacgggcacgcccatgcgcgccgcatcaccatcgggctggacgaccagatccaggtggaggtacgcagcggcctgaaagagggcgaacaggtggtgctggcgcaggcccgggacgaagccgctaccgcacacgcgccgtcgaaatgagcacatccgccaccgcccccttgctgcgcgtacgcggcatccgccgcgaattcgcggccggcgaacagacgctggtcgtgctcgatggcgtggacctggacatccacgcaggcgaactggtggccatcgtgggccagtccggctcgggcaagtccacgttgatgaacatcctcggctgcctcgatcgcccttccgccggtgcataccagatcgccggacgcgaaaccgctcagatgtcgcccgatgaactggccgaactacgccgcgagcacttcggcttcatcttccagcgctatcacctgctgaccgacctgaccgcattgggcaatgtagaagtgccagcgatctatgccggcatggcggcggccacccgccgcgcccgcgcggccgagctgttggcgcggctgggcctgagcgaacgtatgcagcatctgcctggcgagctgtcaggtggccagcagcagcgtgtttcgattgcgcgcgcactgatgaacggcggcgcggtgatcttcgccgatgagccgacgggtgcactggacacccactccggcagggaggtgatgaagatcctgggcgagctgcatgccgagggccacaccgtggtgctggtgacgcacgacatggccatggccgaacatgctcatcgcatcatcgagatccgcgatggccgggttgtcgatgatcgcgccacgggcggggtctctgccgtggatgggtcagcggcggccccgccgcagcgcggcggtggcagcggctggcaggcggtgcgtgaccgctttacggaggcgttccgcatggccctgcgcgcaatgaacgcgcaccgcatgcgcaccttcctgaccatgctcggcatcatcatcggcattgcgtcggtcgtctccgtggtcgcgctgggtaccggcgcgcgccaggccatcctgtccaacatttcctcgctgggtaccaacaccatcgagatctatcccgggtccggcttcggcgacctgcactcggcgcgggtggaaacgctcacccccggcgacagcgtggccctggccgggcagccgttcgtggacagcgctacacccggcgtggccaccaccggcaccgcgctgcgcggcaaccgctcggccagcgtgcaggtgcatggcgtcagcgagcagtacttccgcgtgcatggcctgaagctgggcgaaggtgccttcttcggcccggccgccgtggccggctaccagcaggtagtggtgatcgatgccaatacccgcgcccgcttcttcgctgcggtggacaatcccatcggccagaccctgctgctgggcaacgtgccggtgcgcgtggtgggcgtggtgaagaaggacgccggcgcggtcggcgatgcctcgctgctgcgggtgtggctgccctacaccaccaccatggcgcgcatgctcgggcagagccacgtttccagcatcaccgtgcgtgtctccgatgccatcagcatggaggcggccgagcgcgccatcggacgattgctggcacgccgccatggcagcaccgatttctacatgagcaacaacgcgcagatccgccagtccatcgaacagaccaccggcatcctgaccatgatgatcagctccatcgccgccatcgcgctggtagtgggcggaatcggagtgatgaacatcatgctggtgtcggtgaccgagcgaacacgcgagatcggcgtgcgcatggcggtgggcgcgcggcgcagcgacatcctgcaacagttcctgatcgaatcggtcctggtctgcctgctcggtggcgtgctcggcatcggcgtggccctggcattgggggcagggttggcgctggccaacgtgggtttcagccttgtgttctccgccaattcgatcctggccgccttcgcctgttccagcctgatcggtattggcttcggcttcctgccagcacgccgcgccgcgcagctggacccggtcgaagcactggttcgatagccagtgacgttacctgcagtgacggcaggttcgcgcaatgtctgcgggctctactggagctaccaacaatgtccgcacaggagctggacgatgtctctgaaaccaggaagaaccgcactgctgctggcagccgctgcacaactgatgctgctgttgccctactccggcgacgcccatgcgcaacgcggtaaccgctacaacccgcagtgggaccaggactaccgtgaccgcgatcgtgatgcatgggagcgtcgtgaacgcgagcgtgagcgtgaccgggaacgtgagcgccgccacgatgccaagaccaccggtgtggtggtgggcgtggtgggcgcagccgtcgtggccggtgtgattgccgcagccgccaagcgcgaacgcgagacccgcgaacgcgccgactactgcattcgccgctacggcaattatgaccgccgcaacgatacctatcgcggcgccgacggctacacctatccctgccgctgacctgcacatctcaaggacatacgacccatgaagaagaccgctctgttgatcgcattgtgcgccgctccgctggcctcccaggccgcgccggctgacccgaagcaggcctacatcgattccacgttcacagcgatggacaccaacaaggatgggcgcgtcgacaaggccgaatacaccagattccagcaggggcgcttcagcaagcaggccgattcgatcgacgccgcgttcagtgccatggacacgaacaaggatggcaggatcagcaaggatgaagccacgttggtgccggagattgcgaagtactttgcgggcctggacaccgatggtgatggctatctgtcgctgaaggagatgcagcaggccatggtggccgcgcagacggcagacgccccggcgaggtagcgccccggtactggatgccaatccacatcgccttggtgggtgcccaccctggtgggcacggctgcgtcaccgcgcgccagggccagaatgcccaccaaagtgggcggctaccgcagcggtgaaatggcatccacccaggcggacatctacccggctggtacgcgtcggtcgccaagcgaactcagcaatgcccgcgcaccgagttgcaaagaccgcgtgaggcgaggctgcgacaggccgggaccctagcccatccgtatcgccgggatgtcgcgcgcctgcgcatcgacctcctgctggcgctgcgcgtgtgcctgttcacgatccgcaccgactgcctgcagggcctgcagtgactgctcgaccggcgtctgcaccgcccggtccgtgggcatggaggcccgcagatgcgccggatcattcaactcgccctgcaccacgaacacgttgcggccggccgggtgatcggcagtccgcgcgctcagcagcacatggtcggcgcgttcgagctggttgtggcgcgccaaggccatcacgctcgccaccaggcgctcgccgttctcgtcgtgggtacgcccggcgccggcatcgatcgcggccacgccttcgcgcacctgctgcatcaatgcgtactcacggtggccgggtccaatgtcggccagacgggtcgctacctgcgcgggatccggcacgtcgtccacggctgcggtcagcgggctgcgggtgatggtccggtacgggtcgtccgggtggaactgggtacgtttttcctgccgttccagacgaacgtcccgcgcgtcgttgagttcagcgatgcgggccggatcggtgatctcacgcatcgacatgtggccaccacccgcgctgacactggcccatttcctgtccgcttcgaagtacatcgcgtagtagctgttgccaccgatgacgttcggatcgaccgccgagcgcccttccagtgcctgggtggcttccagcacgctcaaccgggtcaggtattgcccacccttcgtccatcccatctggctgatggcatcgatgctggtgttgcctacgcgcgggcctccggcgtagtcattgttgagcatgttggtccagatctgttccagcttctcggggccgctcttctgctcagccgcctgcagcaacacgcgcggcgtccagcagttgggatcgagttcatgccgttcgaatgcccggtcgtgtgccagcatcacgtccttgccggggagattcagtgcaaattcgggacgcccctgctccatccagaacaggcgtcgctccaggtcctggcgcagaagcgtctgcccaaacatctcccattgccgctcgctcagctgcgcgtcgggaaagctggagcccttgccttcctgatctcgggcgtaatcctgtgcgtagctgtttgcaacgcggcctggcaggctgtcgttgcgaacaacacccagcgcaagcgtgccatagccatccgcatctggcagctgcgacagatagttccagtacaactcacggtttccggccttggcatagctggccagaatcctgagattttcttgcgtcaatccgcccatcgcctgctcctgaatgcactcactgccggacgcgggagcgcgcgagaagatcccgcaccgcatcttccatccgcttccagtccgccaggaaggcccgcttgtagttcagcgagatggaaagcttgttctccacatccgagaaatagtggaagcaccccgcagcggcttgcccttgctcactgatgacctgatcgccctgcaggcgaacgccatccccccgaaacgccgtgctttcgcatttgatgaatgtggtcagactgccgtttggagcgcgcgcgatgtaccaatcatcttcataggcaggattacgcgtgggcggttttccatagcgtgcctcgtattccttcgagaaaatccccatcctcgtttcatcgatggcgtaaggcgtcagtcccatgacgtcgggccgcgcaatacgcagatcgagtcgatcccgaggatcccctcgctccaccgatccttcctcggtggatgcctggttggaggacaatcgctccaatgatgtttcgattggcgcacgatcgatgtagtcgatcgccacagcaatttccttccggaaatcattcgtacgcggattggcccgggcgcccggcgccgtcggcttcatgtccggccactcgatgaccagcgtcacgccctcgccgggccacggtgcgatctggctgtccaggtagttggccggaatgcggaaagtgttcggcccgagcttcacgtccacgggcgcatcggtataggtgtggccgttgatcgtgcgaccggtctgcgttgcgccggacatggcgggattcctttcgtgttcggtggacggcggccgcgcacacgcgccggcactcaccgcgacggcaagtgcaagcgtcaggcaacggccgggggacatcacgtgcatgggcattccattgcagagttcccaatcgattataggtaaaactgcggaggcgaacgaagggtccgcgccccaaggcttaaaggcctaggcgaaaaccactttagacccgagcccgtgaccggctcacccggggggccggtcaggccatccgcatggccggggtgtcgcgcgcccgcgcatcgacctcctgctgctggcgctgcgcgtgtgcctgttcacgttccgcacccactgcctgcagggcctgcagtgactgctcgaccggcgtctgcaccgcccggtccgtgggcatggaggcccgcagatgcgccggatcattcaactcgccctgcaccacgaacacgttgcggccggccggatgatcggcggtctgcgcgctcagcaggacatggtcggcacgttcaagctggttgtgacgcgccaaggccatcacgctcgccaccaggcgctcgctgttctcatcatgggtacgtcccgcgctggcatcgatcgcggccacgccttcgcgcacctgctgcatcaaggcgtactcacggtggccaggaccaatgtcggccagacgggtcggggcctgcgcgggatccggcacgtcgtccacggctgcggtaagcggactgcgggtgatggtccggtacgggtcgtccgggtggaactgggttcgcttttcctgccgttccagacgaacctcgcgcgcgtcgttgagttcggcgatacgggcggggtcagtgatctcccgcatcgacatatggccgccacccgcgctgacactggcccacttcctgtccgcttcgaagtacatcgcgtagtagctgttgccaccgatgacgttcggatcgaccgccgagcgtccttccaatgcctgggtagcttccagcacgctcaaccgggtcaggtactgcccgcccttcgcccatcccatctggctgatggcatcgacgctggtgttgcctacgcgcgggcccccggcgtagtcattgttgagcatgttggtccagatctgttccagcttctcggggccgctcttgtccgaggcggcttgcaggagcactcgaggagtccagcaattggggtccagtctgtgctgctcgaaagcgcggtcatgagccagcatgacgtcagcgccaggcagattcagcgcgagatccgcacgtccgtttcccatccacgcctgtcgaagctccagatcttcccgcagcagtgtccgcccgaatgcttcccactggcgctcgctcagctcggcatttggaaagcgcgaaccttcgtcattctgagatctggcatggctttgcgcgtaggcattggccacgcgtccaggcaaactgtcattacgtaccacacctagcgccagcgtaccgtagccgtccgaacccggcagttgcgacaggtagttccagtacagctcacgattaccggcatctgcataatcgatgaggattctgatgtccttctgggtcaggccgctcattgctttctccttgagcctcgtcgtttagcgcgtccgtgctgcagcaagaacatcgcgaacagcatcttccatgcgtttccagtctttcaagaaagctctcttgtaatgcagggagatggataggctgtcagagatatcgacaaagtagtgaacgcatccggcagccacaggatcgtccagatcaatgacctcgtcctgcgtcaggcgcactccgtcccccaggaacgttgcgctatcgcacttgatgaagcttgtcagtcccccagcaccgtcccgtgcaacataccagtcgcgctcgaatgccggattgcggacaggcggcttcccataccgggcctcgtacttcttcgcgtacaacaccatcttcgcttcatcgattgcatagggcgtcaggcccaaggtctccggctgtgcaacgcgttgatcgagacggtccctgggatcctccctttccacagaaccctcctccgtgatggcttcatttgaggaaagccttgaaagcgaagtctcaattggaatgcgatcgatgtagttgatacgaacagcaatctccttccggaaatcattcgtacgcggattggcccgggcacccggcggcgtcggcttcatgtccggccactcgatgaccagcgtcacgccctcgccgggccacggtgcgatctggctgtccaggtagttggccggaatgcggaaagtgttcggcccgagcttcacgtccacgggcgcatcggtataggtgtggccgttgatcgtgcggccggtctggggtgcgccggacatggcgggattcctttcgtgttcggtggacggcggccgtgcacacgcgctggcactcgttgcgacggcgagtgcaagcgtcaggcaacggccgggggacatcacgtgcatgggcattccattgcagggttccagcgccactatagggaaccgggcgtcaacggaacaggaaccgcgtcgcagcccttcacggcaccaggcagcgttccacctgcagcgacagcgcctggcaggcgttgaacagaccttcgaccacggcggcggagggacagcaggcaggatcgtcgttctcccgtgccacatgcgcggcatgcagcaccgcggtcaacgccgtgatgcccgaaacgctgcgggtcgccagggccatgtcgaaggcgcggccggggctcaggcacatttcactccaggcctcgccatcagcgcgcaggttcctgccgtggcctttcaggtgtgcaaagaatgccgatggggtgacgaactcggctgattcgcggagcgcgtcctccagcgtttcggccaaggcagcgggaagatcaagtacagcggcacccagcagcgcgtgcaggcggggatggtcgggaagacgttcgggcatgacggcaacctcacgatgtggccacctgcagatgcaaggtggcggacggtgcgggttggcgtgccggatacgtagtacgaaagccgacgggccctaagacccccacgcaccatccgccatgaactgacagaaggtgcattgtcgtgatcgcaacatacgttgcaactacgacgccttgtactacgtaagttcgggacgccaatcccggccacggcgaatgctttggcgcggccatggttaccgccctgaaccggcggtggaaagcagggaaatcctgatcgatcacgtcgctacgttggttgcgtcagtggatgtcgagttgtccattgactggcgttcttcgccagcaggcgactcctatcgacgcgtactttccggacgccctgtccagccgtatacgacatgcgcgctgccggtgccaaagacccgccgctggctgtgggcgttcgcgaaacccgcatgcggcaagcgcaaggccgctcagccttcagctatcgccttgggtgctctgatagccacgataggtttcaccccactcgcgcatggccagcagcaccggtaccagcgtgcgcccgaactcggacagctcgtattccactttcggcggcacttccgggtacacgtggcggatcaccacgccatcggcttccagttcacgcagctggctggtgagcatggactgggtggcattgggcacccgtcgcgtcaattccatgaaacgccgcttgccggtcatcaggtgaaacaaaatgatcggcttccacacgccgccgatcaccgacagcgtgacttccaccgcgcaaccgctcttgccgtcccaccgtttgctacgcatgcatactccggaaaaccatagtacctacggaaaatcgtcgttcttgttgcgataacggtgcgagcctagcatggggccatccactgaacgtgagcccccaaccatgagtttcaaggcgctgctgacccgcaagacgaacgacggcgtatccacggaactggtcgatttcaatgaagccgacctggtggacggcgacgtcctggtacaggtcgagtactccacgctcaactacaaggatgcgcttgccctcacgggcaagagtccggtcatccggacgttcccgctcattcccggcatcgatctggcaggcgtggtgctggaatccagcagggccgacttcaagccaggcgaccgcgttgtgctcaatggctgggacctgagcatgggccaccacggcggcctggcacagcgcgcccgcgtacgcggcgaatggctcaaccggattcccggcaacctgagcacccgcgacgccatggccatcggcaccgctggctataccgcgatgctgtgcgtgctggccctggagcatgcaggggtgacgcctgcacagggcgatgtgctggttaccggtgccaacggcggcgtcggctcgattgcggtggcgatcctttcaaagctgggttatcgcgtggtggccgccaccgggcggccggagcacgccgagtatctgcacaacctgggtgcggccgagatcatcgatcgtgcgcagctctcggagccgcgcgagcggccggtgagtgccgagcgatgggccggcgtggtggatgtggccggcggcccaacgctggtcaatgccatcgccgaaacgaagtaccgcggtgccgtggccgcctgtggcctggcccagagcgatgcactgcacggctcggtgctgcccttcatcctgcgcaatgtgacccttgcgggcgtggattcggtgaatgccccacaagaggttcgccagcgcgcctgggatcggctcgcgaccgacctggacccgcagaagctggaaagcaccgtgcagcagatcggcctcgccgaggtgctggatgtctatgagcagatcatccccggcaaggtgcgtggccgcattgtcgtggatgtgaacgcctgacgcctgccgcgccggcgagggtgcaatgccatcgctggcgcgcgtgcgcgagtgaccggaatcccagcgcgccatgccaagccgccttatcatggggcggcaagggcactttacgcccggtgacgtacgcaaggcagtatctggatgtctatggaatggcgcccctcgggctggggccagcgtgtgacccgctcgccggactggcagttgcagctggatggcgaacagctcgcgcttttgatcgacggcaggcagtaccgccagcatgtggcgaacgaacacagcgtgcgggtcgttcgcggcgtgctctggtcccgggtcgaactgacgaccgagcgcggtgaagcactgtccgtggatgggctgcccaacagccagggctcccggcttgcggcggcgctgcagcaggtgcactttgcgcgcaccacacggggacgcaaggccctgtttgacacgatcctggagcagatccaggcgtggctggccgaagcagacgcgcttaccgaccgaggcaccaccggacgccgctggatcacccacgaacagcagcaggcgttgctggccgaccgccccgccctgcccctgccgcccgccgagctggagcagctgttcctcgacgaggaggtgcacgacgacctgcacgcgcccggccaccgcatggcgctggacgccctgcacgactggcagctggattggcccgccgtctgggccgaggccaacgcgaccatggcagagcgcgaacgggtgctggccaaggacttcctggaccgggtcgagagcaagcccctgaccgaggaacaagcccacgccgtcatctgcttcgacaaccgggtacaggtcgtggccgcggccggctctgggaaaacctccacaatggtcgccaaggccgcttatgccatcgaccgcggctttgtcgaacccgaacggatcgtgatgctcgccttcaacaaggacgccgcccaggagctggaggagcgcgcgcagcgatgcttcgaccggctcggcatgggcgacaccgtggtggaagcccggactttccacgccctgggcctgtccatcatcgccaaagccacaaggcgcaagccggatatcccggaatgggcggtcgacgcgacgctgggcttcaacaagctggccgaactggtggacgacctgaaggaccgctcgacccatttccgcacccagtgggacatgttccgcctggtgttcgggcgcgacctgccgccgttcggtgccgacatgatggccgatggttacgaccgcgatggcacgccctacatccgcaccctgaagggtgagcgggtgaagagcctggaggagtgcgtcatcgccgattggctgttctacaacggcgtggcgtacgactacgagcggcgctacgaattcgataccgcgacagacacccatcgccagtatcgcccggacttctactatccggacgcccagctgtatcacgagcactttgcgctggatgccgatggccagccgccgaagcactttgccaactacagcgaagggatgcactggaagcgccagcagcatgtggcgcgcggcaccgctctggtcgagacgacgtcgtttggcctgcgcagtggacaggccctgcagcatcttgccgagcggcttggcgcgtctgatgtcgagctcgacccgaacccggaccgcgagctgcctgatcaaggcgccaagccgatgccggacgcagacctgattggcctgatgcgcaccttcattgcccatgccaagagcaactgcctgacactggacgatatggcggcgcgcctgcggcagatgcccgaggatcagttcaaggaacgctaccggcgcttcctggagatcgccgggccggttttccaggcctgggacaacgcactggctgacgagcgcagcatcgatttcgaggacatgctcaacatggcggccgggctgctggaacagggccactatgaatcgccctacgacctggtgatggccgacgaattccaggacgcatcgcgcgcccgcgcgcgcctctgccgtgccctggtcagccaaccgggccgccatctgtttgcggtgggcgatgactggcaatcgatcaatcgcttcgctggcgccgacgttgcggtgatgactggattccgcgaatggatgggccatggccaggtgctgaaactggagcagacgttccgctgcccacaggcactgtgtgatgtgtccagccgcttcatcagccgcaaccccgcgcagatcgccaaaaacgttcgctctgctgcgccggcaatgggcccggtgctgcaggcgttccagatgaaccggcgcgaggaggtgcaggatggcgttcgccagtaccttgcgaagctgcaccagcaactgttgtcaggtgcagtgccgcagggccgcaccgggcgcgtgacggtctttgttctggggcggtatcgcgcggatcgcggtgcgatgccttcggattggaagacggccttcggcagcacgatggacgtcgagttccttaccgcacatcgatcgaaggggcgcgaggcggactacgtgatcctgccgggcatgatcaaccgcagcttcccgagcctgcgcgcggatgacccggtgctttcgctggcaatgccggacggcgatacctatccgctgagcgaagaacggcgcctgttctatgtcgcgctgacgcgtgcgcgacggtcggtcgcgatgttcaccctgcagggcaagcactcgccattcctggatgagctggtgaaggacggggcagtggaagtaaccgcgatttcaggcgcggccatccacgatgagcgctgcccggtgtgcaaggtgggcgtattcgtggaccggaatgggccacatggggctttccggtcgtgctcgagttacccgttgtgccacaacaagccaacaggtgggcgtcggggctgaatgccgctccctccacatatgcctgcctgcatcagggcacataggcaccgtctcggtttcgcccccggcacgatccgcgccatggcgtttccggaagcgaaaaagccccggcaggaccgaggcttttgtctggagggtggcaaggttgcagggtatcgcaaggtccccacacgtccccgccgcgccctgctacgggataatgcagccgttcagacgcaggcattgcatatagttccgggtgcagatactcaagtttgtacctgacgcctcgcatgcaatgtattggacctcgcagacggaacaagggccgggggctttcgccgtggcgctaccgattccaaaggtcaacgcacaggccgcaacagcaacagaaagcttgaatccaatcttcatgccatgactccgttggtcgccctccttgggcatccgaagcctagcgcgggtgccgggtgcattcaaatttcccggcgcgaacgtttgtgcacttgaaatgattaccgcccttgaatgaagcagttccctgttgtcagaggaatgcaccggtttattcgttcaactgaccctcgcgaccggatggctggccagcaagggccgtagcaacaaaaaagcccctgttcccaggggctctttgaaacaactggcggagagagtgggattcgaacccacggaaggtttaacccttcgccggttttcaagaccggtgccttaaaccgctcggccatctctccaatcgggtcccggtcgcccgggcagcgccgtattctcgcacgtgaagggcatttgcccaagaccaccttgcccctgccctccgcatccggcacggtgggggccttcaccgcactcggagccgccatggcccatctcgatctggccaacctgcgcacctgcctgctggacgacacccagctggccgctgtggccctgcaccgcaccttcgccgggcacctgccggtcagcagcgggcacgtggtggtctgcgatccgctggtgcaggccgaggcgcctgcgctggccgactacaccgccccgctgggccggcatccggtcgagatcatcgtgcacagcggccgcccggcgttggccgtggtctggttcaagccacgcgaagctctcaccgcgaccgccctgcactggcagatggcgcgctggaccacgcaggacctgaccggactggatgaggacagcttcatcggctacccggtcgacgctggcatcggttgcttcatggacaccgacacccagcaggcgctgctggccctgatcgaacgggccgatggcgacaaagacggtgaatggtcggatgcactgatcgaccacgatggcctggatgaaggcgccgaatatcgcccctggggcgaggactcgccgcacggcctggtggtgttcaccagcggctggggcgacggtgtctatcccagctactgggcgctggatacgtccggcattccggtcgccctggtcaccgatttcctgtgcatccagggcggcgacgggcgcgacgagcgcgagattgccgaccaggcctatcgcgacaacctgccagctgcggaagccgaggcgctggcgcggctggtggctgcagtagaacgagacgacgcggaggcattgcaaatcctgttggaggatgcgccgcagcgcgccaacctgatcgaaccgggctgtggcggcaccgccctgtacgaggcgatccgcctggatcgtccgcaggcattgcgggtgctgttgcagggcggcgcattgccggcaatgcccgaacgcctgcacatgagcaaggtgaccagctatctggactatgcgcgattcctgaagaagccacgcagcgcggagctgatggcggtgctggaagcgcccgtcgttgcagccggaccgccaccggccgcaccgcgacgccgtagtttctgggaccggctgttcggccggaactgatcggcgccggaatacagcaacgccgggcatggcccggcgctaccttcgcgccttctcagccggcatccaccgccagcgcacccagtgcactggccttgatccgctccttggccttttcacaggcgccaccgcaatccaggcgcgaggcctccagctgcggcggcaggtgctcggccaggaagtcgatgaacacgcgcaccgccggcagcaggccgcggcgcgaggcgaacacggcgtggcacacgccctgcggcagcgaccagtccggcagcaccacttccagctcgccattacgcacggcgtcggcgcacacggtttccggcagcatggtgatgccgaaaccgtccttcaccatgctctgcagcagcgggaagtcgaagccggccacgcgcggctgcaggtcgacccggcgcacttcgccttccgggccatgcagttcccagcgctggcgggcttcgtcttcgctgatgctgagggtcacgtgctgggtcagctcttccgggtccttggggcggccggcgcggtcgaggtacttcgggctggccaccagcagttcctgcacctggccgaagctgcgcatcaccaggctgccgtcgtcgtccaggcgcgaacgcacgcgcagggccacgtcgtagccttcgttgatgatgtccacgcggcggttgctgatgttcagctgcaggcgcaccttcgggtactgctcaaggaacttgggcagcagcttgggcagctgcatctgcgccagtgacaccggcacgctggcgcgcaccacgccgcgcggttccgcgctgaggcggtccaccacttcgcgggcggcctgggcctcggccagcatcgtctgcgcatggcggtgcacgctggtgccgacatcggtgaccgcgaaacggcgcgtggagcgctgcagcaggcgcacgcccaggtcggtttccagctggctgatgcggcggctcagtcgcgacttggggatgcccaaggctcgctcggcggcggcgaatccgccgtggtcgaccaccatcgcgaagtagtacaggtcattcaggtcatgcatgcccgagttccatatctagaacaatacgtggcattcaatcacctttattccgcccttgcaacaacctatcgttctctccgtcggcggggacaccccgccccttcctcccagaacataggtgactgccatgaagcttctgcatctcgacgccagcgtgcttggcgacaactccgtctcgcgccagctgtcggccgccgtggtcgcccgcctcgccagccagatcgacggcctgcaggtcgattatcgcgatcttgacgccaatccggtaccgcacctgcgcagcagctcgctggccaagaccgacgccgctgaagcgaccgatgctgaacaggtgatgcagcagttcctggaggccgacatcgtggtgatcggcgcgccgatgtacaacttcagcatcccatccacgttgaaggcctggatcgaccgcgtggccgtggccggccgcaccttcaagtacaccgagaacggcccggtgggcctggccggtggcaagcgggtgatcatcgccagcagccgtggcggcatctataccgactcgccggccgacttccaggagccgttcctgcgtcaggtgttcgccttcatgggcatcaacgaagtcgagttcgtgcgcgccgagggcatcgcctactcgccgcagcaccgtgaagacgccatcgccggtgcgctggcggcgctgccgtcgcacgaagcggccgaagccgtcgcggcgtaacgcgttccaacgttcggcgcccctctctcctcgtctgggcgctgaacgcgggccgggatcccctccccctcccggcccaccctggcggccccgctgtgcggggccgttttcttttgcggcgcgctaggctgggggcatgaactacatcgtgacggctgcgcaccgcagcgaatttccgcacccgatcatcctgcgccgcggccaggcgctggtggtggcgaacgttatgaaggcccggagggctgggacgactggttcctctgcgaggccgagggacagcagcccggattcgtgccgacgccggtgatcggccgcgatgcgcagggtggcgcgtttgccacgcaggattactgcgcgcgcgaactggatgtggaccccgggcagacgctgcgcgggatgcgcacgctcaatggctgggcatggtgcgtgccggagaacggtgaaccgggatgggtgccgctggagaagctgagggccataaaggagagccgagcataggctcggctctacacagatctgtagcgcccgagcccatgctcgggcggcggcgcgaagcgccggctatcagccaatggtttccaggccacccatgtacgggcgcagggcctccggcacggtgatgctgccgtcggcgttctggtagttctccatcaccgcgatcatcgcgcggccaacggccacgcccgagccgttcagcgtgtgcgccagctccggcttgccggtggccgggttgcgccagcgcgcctgcatgcggcgggcctggaagtcaccacagttcgagcacgaggaaatctcgcggtaagtttcctgcgacggcagccagacttccaggtcgtaggtcttcaccgccgagaagcccatgtcgccggtgcacagcagcaccttgcggtacggcaggcccagcttttccagcaccacttcggcgcagcgggtcatgcgctggtgttcggcgtcgctgtcttccgggcggctgatcgagaccagctcgaccttctcgaactgatgctggcggatcatgccgcgcacgtcgcggccaccgctgccggcctcggcacggaagcacatcgagtgggcggtcatgcgcagcggcaggcgctcggcgtcgacgatctcatcgcgcacgatgttggtcagcggcacttccgaggtcgggatcaggtaacgcgtggagtcgcccacggcggtcttgaacaggtcgtcctcgaacttcggcagctggctggtgccgcgcagcgagtcggcgttgaccagcagcggcacgttggtctcctcgtagccgtgctcgccggtgtgcaggtcgaccatgaactgggccagggcgcggtgcaggcgcgcgatcgggccacgcagcacggtgaagcgcgaaccggacagcttggccgcggtctcgccgtccagccagccgttgcgggcgcccagttcgacgtggtcgagcaccttgaaatcgaactggcgcggggtaccccagcgcgcctgctcgacgttgtcgttctcgtcggcaccggccggcacatcgtcggccggcaggttcggaatgcccatcgagatcgcttcgatcttctcgcgcagttcgtccagcgccacttccgaggccttcagctcgtcggcgaaggcagcgacctcggccatgatggccgaaacgtcctcgcccttggccttggcctggccgatggccttggaacggctgttgcgcaggctctgcagctcctgggtccgcacctggatgcgcttgcgatccgcctccagggactccagggcagacacgtcgagctcgaagccgcggctggtgcgcaggcgttcggcgaggtcggcgggctggtggcggagcagggctggatcaagcatggcaggtgtcgtggtgggtatcagggatgggattatcgcttgttatacggatttctgccgcccggttcattcctggcgtggcagaatcgggctattccgtactggtccggtccatgtctgcaccccgctcgtcgtccgccaagtcgttcactgtgcatatcccgcgcaacgccctgaagatcgccggcatcgctttcggcgtgggcgtgctgttgttcgtgctggtctggttgaccggccgcgacaaggagttcttccgtgccgatccggccgcgcagaccccgcaggagaccgcgcaggtggaaccgctgccggaaccgctggccgccgccgcaggctccagcgacatgcccgatgccaagccggccccggtagaggacgacgccccgaagctggtcgaaaccgccccgccgccgccggcgcccatcgctgaaccggccccggccacgccgagccctgcgccagccgccaccggcaacagccaaccgatgccgattgccggccagtcgccgccgccggcctacccggccgcggccctgcgcgcgggcgagaccggcagcgtggtggtgcgcgtggacgtggatgccaccggctacccgaacaatgccacggtgatccagcgcagcggctcacgcgagctcgaccgtgccgccaccgacgccgtgcgccgctggcgtttcaccccggcgcagagcaacggccaggccgtaccgggcagcattgaagtgccgttcgacttcaagacccagtaactgaacgtttcccggcaggcaacctgaaccctgccggtgacgttgacgcaacgctgacacttcccgccactggcccgcgcaacactctcaccgtcgtccattgacggaaggagtttgcgatgaccgccaccacccacgaagaccttcattcgccgcagctgcagcgagacgccagcgaacagcacaagcccacgtcgccctggatgtggatcgcgctgatcgtggcgatgtttgccgccgcgctgctctggctgcgtcactcgaatcaggaagacgtggcgccggcaccggtcggcgagcgcatgctgcccgcccccgagcaggcgccggtggccgacgcgcagaagccggcggcccgccaggccgcaccggtcggcaaccagcgcaaagccgcccctgcggtacgcaatcgcgaggcgcgcccgctggcaggcaacatcaagccgacctaccccgccgccgcgctgcgtaatggcgtacagggcagcgtgatcgccagcctgaatgtcgatagccgcggccaggtgaccaatgccgcgattgtttcgcgcagcggcgaacgcagccgtgacctggatcgcgcggtgctgagcgccgtgcagaactggaagttccagccggcgatgcatgaaggccgtgcagtggccagtgtggtgcgggtcccggtggatttccgtaccgaacagcgttgatcgcggacgaggggttcgtgatgtttagacggaggcttcggcctccgtccttttatctggagaggcgtgccaaccagggttggcacctaccgggcgatgtgagcgtgccaaccagggttggcacctgccggaaaacgcgatccgccgatcaggccaggttgaagccggcgctgcgcgccaggccatcgaagtccgggaaggacgtggcgacgttggcgatgtcgttgatgcgcacttcgccgtcgctgatctggccggcaatggcgaatgccatggcgatgcgatggtcgccgtggctttcgatggtgccactccccagccgagccccgccatgcagggtggcgccatcctcggtctcgtccacctgcatgcccagcgcgcgcaggccagtggccatcgccgcaagacgatcggattccttcacccgcagttcggcagcaccgctcaccacggtctggccttcggcggcggcggcggccacgaacagcgccgggaactcgtcgatcatgtccggcaccagtgcttcgggaatacgcgcgcccttcagcggagcgtagcgcaccaccagatcggccaccggctcaccgccctgctcggccggattctcttcgctgatatccgcccccatcaggcgcagcgcgtgcagcaggccggtgcgacgcgggttcaggccgacctgcttcaggcgcagttcggaaccgggaatgatgctggcggcgaccaggtagaacgcggccgaagagaagtcggccggcaccacgatgtccgtggcgcgcaggcgctggccgccccgcaggcgcgcctcgcccggcgagaattcgatgtccacgccgaaggcggacagcatgcgttcggtgtagtcgcgggtcgggtggggttccaccacgcgggtttcgccctgcgcgtacaggccggccagcagcacggccgacttgatctgtgcgctggccaccggcgaggcgaagtcgatgccatgcagcgtctggccgccatgcacgtgcagcggcggcgtgccgtcgtcctgggtatcgatccttgcgcccatctgcgacagcgggccggtgacacggcgcatcgggcggccggacagcgactcatcgccgatcagcgtgcagtcgaacgcctggcccgccagcaggccggccagcaggcgcatgccggtgccggcattgccgcagtccagcggtgcctccggtgctttcaggccgtcgatacccacaccatgcacgatgcgctgcgacgggctgggggtttcgatgcgcacacccagctggctgaagatgcgcgcggtggcgcgggtgtcctcgccttccaggaagccttcgatatgcgaagtaccatcggccagcgcggcgaacatcaccgatcggtgcgagaccgacttgtcgccgggaatggtcaggctgccctgcagcggctggcccttgcgggcgatccaatgttgcgcgttgctcatcgttcgatcgttccgtaaacgccggcagcgccggcgatgcatcagggagcggcggccagggccgccacagcagcactcagggcacggccaccgggtaggagcccagcaccttgatctgcgccgagtgcgcttccagttcggccagcgccgcctgcatcggcgcgtcgtcgatgtggccggccaggtcgatgaagaagccgtattcccacttgccgtggtgcgacggccgcgactcgatgcggttcatgctgatgccgtggcgggcgaacgggctgagcacatcgaacagcgcaccgggcttgtcatggatgaacaccagcaccgaggtgcggtcgtggccggaggtcgggaagatgttgcggcccaccaccaggaagcgggtggtgttgtcggcatcgttctggatcggcttggtgaccaccttcttcaggccgtacacgtggccggcactctcgccgccgatggccgctgcgtcgtcggcgttgcgcgcacgacgcgcaccttcggcattgctcgagaccggaatcttctcggccttcggcaggttggcgcgcagccacgccgaggtctgcatgaacgactgcggatgcgcgtagatgcgctcgatgtcctcgatgcggccgctgcgcgacatcaggaactgctgcacgcgcagttccacttcgccacagatcttcaggttggaggtcaggaacatgtccagggtgatctggatggtgccctgtcccgaattctccaccggcaccacgccgaaatcggcgttgcccgcttccacttcctggaacacttcctcgatgctggccatcggcaggcccagcgcggagcggccgaagtgcttgagcacggcctgctggctgaaggtgccttccgggccgaggtagccgatcttcagtggctcctgctgggccaggcaggccgacatgatctcgcgatagacatgcaccagcagctcgtcgctgagcgggccttcattgcggtccaccaccatgcgcagcacctgcgcttcgcgctcggggcggtagtagtcgacagcggcggccagcttgcccttggccttgccgacctggtgggcgaagcgcgcgcgctcggcgatcaggctctggatgtcacggtcgatctggtcgatcttcgagcgcacatcggccagcgccagcggtgccagggtgggtgccgggttcgaggcggccttggccttgcccttcgccttgctgggcgcgctgtccttggccggttcggccttcttcggcgccttcttgctggatttgctgcttgccatcggaattccttgttgcgggacccgcacccgacggtgcgcgccgttcattgctcagccgtgacgctgctggaaatcggccatgaaggcgaccagcgcctcggccccggccagcggcatggcgttgtacagcgaggcacggatgcccccgaccaccttgtgtcccttcagcgccagcaggccggcagccttggcttcggcgacgaagcgggcatcaagcccggcatcgggcaggaagaacgggatgttcatccgcgagcgtgccgcatgcgcgacctcgttgcggtagaagccgccggagccatcgatggcgccgtacaccagtgccgccttggcggcattgcgcctggcgaattcggccacgccgccttcggccagcatccacttgaacaccaggccggccaggtaccagttccaggtcggcggggtgttgagcatcgaatcgcgggcgacatgcgagcggtaatcgaagatgtccgcgcgcggctggccagtgcgctcgagcagatcgcggcggacgatcatcactgcgatgccgaccgggcccaggttcttctgcgcgccggcatagatcacaccgtagcggcgtacatccagcggctcgctggcgatggacgagctgaagtccgccaccagcggcacatcgccggtatccggcacatcacggaactcgacgccgtggatggtctcgttggcggtgatgtgcacataggcggcgtcgggcgagagctgccagtcggcgcggggcggcagcgtgcgatagccgtcgggctcgctgctggcggcaatgttgacgtcgacgtagacgccggcctgcttgaccgcagtctttccccaatggccactgaccacgtagtcggcgcgctggccggggctggcgaagttgagcgggatcagcgcctgctgggtggtggcaccaccggacaggaacagcaccgcgtagtcgtcggggatatcgagcaggcggcgcaggtcggcctcggcctcggcggccacggacatgaattccgcgccgcgatggctcatttccacgatcgaggcaccactaccgtgccagtccagcatttccgcctgcgcctggcgcaggaccgattccggcaaggtcgcagggccggcactgaagttgaacgcgcgcgtcatgtcacacctgtggggcaagacccctagtatgccgcagtgcaccagccttgcggcctagtgcggcaagggaaatttggtttcattggaatccattcgccgccggcgtggcgccggtagtcgccgacctcggtcggcgtacgccgtcaggcgtcatgcccgccgaaaaagcgtgccgaccaaggtcggcacctaccaaagccgtgtgctgccaggcgtcaagcccgcatacggagcgtgccgatctaaggtcggcacccaccagggcgcggacccagcggattcagatcagcagcaaagccccggtagtcgccgaccttggtcggcgtacgccgtcaggcgtcatgcccgccgaaaaagcgtgccgaccaaggtcggcacctaccaaagccgtgtgctgccaggcgtcaagcccgcatacggagcgtgccgatctaaggtcggcacccaccagggcgcggacccagcggattcagatcagcgcgcgccgaaccagagcagcaggctgagcagtgcggccagcagcagcgcactcaccagcagccacggccagcgccggaccctgcgcggcgcggccggcagcaccggcgcctgctcggcctcgtggctggcgtcgtcctcggcgggcagcggccgccggcgcggatcgtgcggcacttccagcacgaaccggtgctggccatcgaacacgacctggtcgccggcctgcagccagcagtggcgcacggccacgccgttgacccgggtaccgtcggcgctgcccaggtcgcgcagcagcacgcgctcgccgtgcacttccacgcgggcatgctgttcggcgaaggccgggtcatcgatggcgatgtcggcctcgttgccgcggccgatcaggcgggcctgcgacagggtgaaactgcggccatggtgcaggccaccgacaccgcgcagcagtcgttgctgctcgtcgctgccatcctcgttcttcggcgcaggcgcctgcagcaggctctcgacttcgccctgcagcaccatctccacgccatccacgtataccgcatcgcccgcgcgcagcagggccatccggcgcaccggtcgaccattgacgtggatgccgcggatgccattgccgacctgcagccagaggccgcgatcgtccatgcagaactgggccagcagcagggcgccgtggccggcatcaccgagccgcacgctgccgttggcctggcgcacgatgcgctgcaccccgggccgcaggggctggtcgggctgttgttgctgactgaagtgaactagcaggttctgcacgcggcgcagcctagcaggttggtcgccaacgaagaagaacccacgatgagtgcttggcgcggcggcccttgatgcgcacaatgctcgccctctttgatcatccccgccctgcgccaggagcctgcatgtccaccatcgatgtccgccacgcccacgccctgcccgacgcacaggcgcgcgccgcgatcgaacaggtcgctgccaagctgtccgagcgcttcggcctgaagtcgtcctggaccgccgacgtcctgaacttctccggcagcggtgtggacggtgcgatcgaactgcagccgggcgccgtgcgcgtgaccgccaagctcggtttcctgctgtcggcgatgaagggcatggtcgaaggcgagatccagcgcgtgctgaaggaaaagctgggctgaatcctggcggcggccatcacggccgtgcaacgccaccgcgcgctactctcggggcaggcccaactcccacgggaagtgcgatgaaccactacgagaacgacgaccgccgcaacgacgacgcctctttcggtgaccaggccgagcgcttctcgcgcaagctcagcgattcggcgcaacaggtctggctggccgggctgggtgcgctggggcgcgcgcaggccgagggcagccgcttcttcgacggcctggtgaaggaaggcgaagcctgggaagcccgccgccgtgaacgcagcggcgaacagggcccgggctggcgtgacaacgtcgaatcgtccctggatgaagcccgcgagaaggcctcgggcacctggaacaaggtcgagaaggccttcgatgaccaggtgcagggcgtgctcaagcggctgcatgtgcccacggccgacgaggtgaccgcgctggaagcccgcatcgatgccctgcacgcgcgcctggccaggctggaaaaccgggcggcttcgggtgcagatgcccccgccccgggcagccatcaatcgccggacagcattccctgagcgcaattgttgcaatgcaataaattttgattgacaatcgcgagcaacccgccaatcgcttcggctgccgtttgttccctcccctcacggcttcaggattggcgggtttttcgtgtccgccgtataccgatctgcgcgctccatcacgcttcctgtcaggaacatcctgacccagccgggcaccgcgacctttacactgtcgctctccgctttcgccccttccgccctactcctgcatgctcccctggatcctggccctgctgtcggccctgcttacctgttccctggccgttgtctatctgtggtggatcaagcggcggcagaaggagatgcaactcggcctgcaggccctggcaggcatgcactggcgcgaattctcggttctggtcaagcgcatgctgcgcgaacagcgcggcctgcgtgagctgatcgatccggccgaagatacccgcgagccgagcagcgacttcctgctcagcgatggccccaatcaatggctggtgtcgtgcaagcacggcctggcctaccgcatcggcaccgccgcagtgaacgaactgggtgcggccgcgcgcctggccggcgccaagggtggcgtactgctgaccgaaggccgtatcgagcgcgacggccgtggcgccgccgagaagcaggcggttgaagtgctggacgggccgcgcctgtggccgttgctgcagccctacctccctgccgatatcgaagcgcgcgtgcgcgccagcgcccggcacgaagcgctgcgccgcattgccattgccgcactgggttcggccacgctggggctgcttgtcggcctgggtctgcagggcctgcatgtggaagaggccactccggtcgctgcggcgccggtggtggcaacgccttcggccgcgccttcagccgcacccgccccgatcgaagcagtccctgcggtcgcccccgctcccacgcctgccgtcgcgcccgcgaccgacgcgcgcagcaatcccgaccccgatgccgccacgctggagcgcttccaggccgatctggcccgcgccctggccggcaagcccggcatcgccagcggtgtctggctgacccggcagacactggcgatcaaccgcaccggcgaactggacgcggtgtggccgctggtctgcgaggaagtgctgcactaccccgcgctgcgcaacgtgcgcatccagctcaacgcccgccccggcgtggatgagcccgtacgctggcggcagtgcgctacgtattgatggcgcagcatccgcgcatggcgtggatctactgaatcccgatgcgcgaccccttggtagatccacgccacgcgtggatgcctttgcagagttgagccacgcgcgaacaacagccgagcatgggctcggctccacatggcgcctgctcagcccaatgccgcgagatgggcgatgtaactggagcgcgattcacccgccgctctggcctgcgcatccagcctcgccaggatccggcgtggcaggctgatattgacccgctcgatggtgtcgtccagcagagccggatcaacgcagatgtacgcaagaatccaacagatgtccttggatgcctcggcggcgatcttctgcggcgctgaaggtgtcggaatcgagcgcccctcatccagggccacatcaatccaggcgagcgccgcctcttccgccgcagtgagcgcatcatcaagcgtgtcggccgctgagaagcaccccggcagatctggaacgaccacaccccacgcggtgcgctcatcgcccgcctcgatcaagactggatatcgcatgggccctcctacgtcagtcctgcgagcttccgcaacgcctgcaccagccctttccccagatccttccttgggtgaggaacggtgatgatgtgagggtgctgcgagtgcacgaatacatgatgggatccgcggatccgacgacagatccaacctgccgcttccagttcccggatgaggtccctgctcttcatgcagggacgatacacatcgtacacacgccccgacagagttcaaggcgacagtcgtttcggcagagtagatccacgccatgcgtggatggaatccctatcgcgcgcccggcgcgaagcgcgccaccaggtcccaggcatcccccaggaacacctggcgaacgcgggtgatcggctgttcgccacgccaggtcaggcgttcgatcaccaggcaggcggtaccgggcttcacatccagcagcctagcggtggcagtatccgcgccccaggcactgatgcgatgctgggcacgggtccaggacacgttctgcagcagccagctgcccggggcggtggtgctgaagtcgacctccaacacctcgggcacgcccaccgggctgatcaggcggtgctccagtgccagcgggcggtcatcggccaggtgcaggcagcgcatcgccagcagcatttcgctgccggccagctcgacttcgccggcattgccggcatcggccaggcgcaggtcgcgctgcagcaatcgataggcgtactgatgtccccgcgagccgacttccatcgcaatgtcgggaatctccagcgccacctgctccaggtgcggtggctgacgcgccacgaacgaacccgcgcgacggcggcgctcgatcatgccgctctcggccagtgcggtcagcaccttgttcaccgtcatccgcgagcagccgtactgctccatcagctcgtgttcgtacggaatacgaaagcctggcgcccattctccgctgaggatgcggctttccagatcgctgcggatacgctggttgagcgtggcggacttgctggccttcacgtaatggggtctcggtggcgggaggcgatcagcccagcacgccgcgcagggcggcagcgaaggcgctggtgatcgcctcgcgctgcaggtggcggccctcggccacgcactggcggccatggcgccagaccgatcgcagcgcgccattacgtgcggcgaacacccagctgtcaagccatgcgtcatcctgtcgcgcctgcagcgccgggtgtgcggcgtccagttcaaccagatcggcactggcgccgacctgcaggccggcggccacgcccagcgcctgtgcgccaccgtgcagtgcaccttcaaacaggaaacgaccgctgctgcgggtggcatccggcgccagcacgttgcgcccgcgcagggtaagccgctggccgtactcgagcaggcgcagttcttcggccgcgtcgatcagcacattggaatcggaaccgacgccgaagcgcccgccctcgcgcgcgaacgcctgcatcgggaacaggccgtcgcccaggttggcctcggtgatcgggcacaggccggccacggcctggctggcgacgatggccgcgcgctcgtcatcagtgatatgggtggcatgcaccaggcaccagcgcgcatccaccggcgcatggttgtacagccactgcaccgggcgctggccgctccaggccaggcaggcctccacttcgcgcacctgctcggcgatatggatgtgcaacgggccgtcggtcagcggcagcaacgcactcagttcctcgccggtgaccgcacgcaggctgtgcggtgcgatgccgagcaccgcgtcgggcagcgcggccaaggccggcttggcggcctccagcagctgcgcgaagccgtccacgtcgtggatcaggcgccgctgcgctggattcggcgccgccccgccgaaatcggcatgtgcatagaacaccggcagcagggtcaagccaatgccggtctggtcggcggcggcggcgatccgcgcactcatctcggcgcggttggtatacggccggccgtcggcatcgtggtgcaggtaatggaattcgccgacgcgggtgaagccgctttccagcatttccatgtaggcctgggcggcaatggcctgcaccgcgtctgggcgcaggtgggccaggaaacggtacatcagctcgcgccagctccagaagctgtcaccgtcgccgccgccgatctcggtcagcccggccatgccgcgctggaacgcatggctgtgcaggttgggcaggcccggcaccaggatgccgacgcgggtgtcgcccgcctgcgcgccctgccccgtgctgatggccgcgatgcgaccgtcctgcacctgcaggcggacatcgcgggcccaaccctcggccagcagggcgtgggcggcatggaaactgtgcggggaacgcgaatcggacatggctggacaacccgaaatggacgcctatattgtatagacatataagcacagccgcgttgtggatgccatgcacgtcgataccctctggtccaacgtccacctgatcacccttgatggcgaagggctgggtgtcatccgcgatggcgtcctggcctgcgccgacggccgcatcgtccatgtcggcgcggccggcagcgatgcccacctgcagccgaccacccgcatcgacggcgaaggccgttggatttcgcccggcctgatcgactgccatacccacctggtctacgccggcaaccgcgccagcgagttcgagcagcgcctgcagggcgtcagctatgccgagatcgcccgtgccggcggcggcatcgtctccaccgtgcgcgccacccgtgccgccacgccggaacagctggcccgcgaaagccggccacgcctgctggcgatgcgcgccgagggcgtgaccaccctcgagatcaagtccggctacggcctgaccctgcccgacgagcgcaagcagctgcaggtggcgcgtgcgctgggcgaggaatgccgggtcaacgtggtgaccaccttcctcggcgcgcacgcggttccgccaggccgcgaagcacaggagtacaccgacgaagtgtgcgaggtgatgattccggccatcgccgccgaaggcctggccgaagcggtggatgtgttctgcgagaacatcgccttctcgccggcgcaggcgcgccaggtctttgaggcggcgcgcgccaacgggctgtcggtgaagatccacgccgagcagctgagcaaccagcatggcgccgaactggcggcccgcttcggggcactgtcggccgaccatatcgaacatctggacgatgccggcatcgccgcgatggccgctgccggtaccgtcgccgtgctgcttcccggtgccttctatttcacccgcgataccaccctgccgccgatcgccgcgctgcgtgcggccggcgtaccgctggcgctggccaccgacagcaacccgggcacttcgccgctgaccagcccactgctggcgatgaacatgggcgccaccctgttccgcctgaccgtggacgagtgcatcgccggcttcacccgtgaagcggcgcgcgcactgggccatggcgagcgcatcggccgcctggcggtgggcatggactgcgacctggcgatctgggacatcgatgcccccgccgacctggtctatcgcattggattcaacccgctgcacgcgcgcgtggtgcgcggacagcccgacctgcctgcctcctggagcaacacatgagcaacaccctggttcttcgccccggccatgtcactctcgcccagtggcggcaggtctatcgcggtgcgccgcttgcactggacccggccgcgctgccggtggtgcgcgccagtgcggcggcggtggccgccatcgtcgccaagggcgcgccggtgtatggcatcaacaccggcttcggcaagctggccagcgtgcgcatcgagcgcgaagacctggccaccctgcagcggaacattgtgctctcgcatgccgctggcgtgggcgagccgatgcctgccagcgtggtgcgcctgatgatggcgctgaagctggtcagcctggcgcagggtgcgtcaggcattcgcgaggagaccctgctgctgctggaagcgatgctggtcaagggcgtgctgccggtggtgcccgcacagggctcggtgggtgcctcgggtgacctggcgccgctctcgcacctggccagcgtgatgctgggcgtaggcgaagccttcatcggtgacgagcgcctaccggcagccgacgcactggcacgtgccggcctgcagccgatcgaactgggcgcgaaggaaggcctggcgctgctcaacggcacccagttctccaccgcctatgcgttggccggcctgttcgagatcgaaaccgtgttccaggccgcactggtgaccggcgcgctgtcggtggaagctgccaagggttccgacacgcccttcgacccgcgcatccacgcgatccgcggccagcgcgggcagatcgccaccgccgccaccctgcgcgcgctgatgcagggctcggacatccgcgaatcacaccgtgacaacgacgtgcgagtgcaggatccgtactgcctgcgctgccagccgcaggtgatgggcgcggcgctggacatcctgcgccaggccgcgaccacgctggaaatcgaagccaacggcgtgtccgacaatccgctggtgttcaccgacaccggcgaagcgctgtccggtggcaacttccacgccgagccggtcgcctttgccgccgacatgctggcgatggcggtgtgcgagattggctcgatcagcgagcgccgcctggcgatgctggtggacccggccctgtccggcctgccggcgttcctgaccccgcgcccgggcctgaattccggcttcatgattccgcaggtgaccgccgctgcactggtctcggaaaacaagcagcgcgcctacccggccagcgttgattcgatcccgacctcggccaaccaggaagaccatgtgtcgatggccgcgcatggcgcacgccggctgatgcagatggccgagaacgccgccaacgtgatcggcatcgagctgctggccgctgcgcagggatgcgacttccacgcgccgctgcgctccagcgccgcgctggaaaccgtgcgcgccaccctgcgtgcgcaggtgccgacgctggaagaagaccgctacttccatccggacatggtgaccgccacgaatctggtgcgcagtggcgcgctggcgcagggcctgaccgacctgctgccaaccgtggaaccgcaggcatgaatacccatcccgaatggctgacggtgcacgaaggcgacgcccccctcatcgtcagctttccgcataccggcagcgagctgccgcacgacctgatcggcgactaccactcaccgtggctggcccgccgcgacacagactggtgggtacacgaactgtacgacttcgtgcgtggcatgggcgcgaccacggtgcgctcggcgatctcgcgttcggtgatcgacctcaaccgcgatcccagcggcgtgtcgctgtacccgggccagaacaccaccggcctgtgtccgctgaccaccttcgacaaccagccgctgtaccacgccgggcgcgaaccggacgaagcggaaatcgcccgtcgccgcgacacgtatttcctgccttaccacgatgcgctggcggcgcagatcacgcgcctgcgcgcacgccacgctaccgtggtggtgtacgacgcgcactcgatccgctcacacatcccgcacctgttcgaaggcgagctgccgcagttcaacctgggtaccgccggcccctccggtgcaccggacacctcctgcgacaacgccttgagcgatgtggtggagaacctgctgaaaatcagcggcatgagccaggtgcgcaacggccgcttcaagggcggctggatcacccgccactacagcaacatcgccgccggcgtgcacagcctgcagatggaacttgcctgccgcggctacatgcacgagcccctgccggaccaggtggacgaacacagctggcccaccccgctcgaccccgcccacgccgcaccactgcgccacaccctggcgcaggtgctcaacgcctgccttgaatttgctacgaaccggagcgccgcatgacccgcaacgacccatcccgcaccgtcgccgcgccgaccggcaccacgctcaatgccaagagctggctgaccgaagcaccgctgcgcatgctgatgaacaacctgcacccggacgtggccgagcgcccgcaggaactggtggtgtacggcggcatcggccgcgccgcgcgcgactgggaaagcttcgatgccatcgtcgagacgctcaagcgcctggacgacgaccagaccctgctggtgcagtcgggcaagccggtaggcgtgttccgcacccacgccgacgcgccgcgcgtgctgatcgccaattccaacctggtgccgcgctgggccaactgggaccacttcaacgagctggataagaagggcctggccatgtacggccagatgaccgccggcagctggatctacatcggtgcgcagggcatcgtgcagggcacctacgagaccttcgtggaaatggggcgccagcatttcggcggcgacctgaccggcaagtggctgttcaccggtggcctcggtggcatgggcggcgcacagccgctggccgcggtgatggccggcgcctcctgcctggccgtcgagtgccgcaagagcagcatcgacatgcgcctgcgcaccggctacctcgacacctggaccgataatctggacgaagcgctgcgcctgatcgacgagtcgtgcaagacaggcacgccgaagtcggtgggcctgctcggcaatgtggccgatgtgctggccgaactgctcaagcgcggcgtgaagccggacctgctgaccgaccagacctccgcgcacgacccggtgaacggctacctgccgcagggctggacggtcgaacagtgggatgagaagcgcgcttccgcccccaaggaagtggagaaggccgcgcgtgcatcgatggccaaccacatccgcgccatgctcggcttccatgcgctgggcgtgccgaccgtggactacggcaacaacctgcggcagatggcactggaagaaggcgtgtccaatgccttcgatttcccgggtttcgtgccggcctatatccgtccactgttctgccgcggcatcggcccgttccgctgggctgcactgagcggtgatccggaagacatcgccaagaccgatgcaaaggtgaaggaactgattccggacaacccgcacctgcaccgctggctggacatggccgccgagaagatcaagttccagggcctgccggcacgcatctgctgggtcggcctgggtgatcgtgatcgactcggcctggccttcaatgaaatggtggccaacggcgaactgaaggcaccggtggtgatcggtcgcgaccatctggacagtggcagcgtcgcctcgccgaaccgcgaaaccgaagcgatggccgacggctccgatgcggtgtccgactggccgctgctgaacgccctgctcaacaccgccagcggcgcgacgtgggtgtcgctgcatcacggtggcggcgtgggcatgggcttctcgcagcacgccggcatggtgattgtctgtgatggcaccgaagcggcggcgaagcggattggccgcgtgctgtggaacgacccggccactggcgtgatgcgccatgccgatgcggggtatggcatcgcgatcgactgcgcgaaggaaaagggactggatctgccgggaatcctcggctgatcacggaggtgccggccagcggccggcactaccgaaacgtgtggtagtgccggccgctggccggctctccccgatgcgggaatcggcggccttgacccgctcgtcggtcgtgaccaacatgcgccatcaccgctgatggatcaccgcgatgtaccgcacgctcgctgccgcactgctctgcacgctgtttgcgatcccgcccgcttcggcgcgtgacgtccccaccactctctccactcagctcgacgcccaactgcagagcaaccgcgagcgctacggcattgccggccaggcggtactggtcgcacacaacggccaggcgctctaccagggcgccagcggtgaacgtgatcccgctgcccatgcccctgccaccgtcgagaccatcttcgccgcgcagtcgatggccaagctgctgaccagcacgctggtgatgcagttggtcgatcagggcaaggtggatctggatgcgccggccagccgctacgtgccgggcctgccgattgcatggcaggcgatccacgtgcgtgatttcctcaaccacagctccggcatcggcgagtactacgaccgggtggataaccgctgggtgagcaagggctaccccggtgtagcgcctgaccttgccgctgcgctgaaagtcgccggcgcggcaccgatgcagttcgccaccggcagccgcatgcagtacacccaggccaactacctggtactgacagcgctgctggaagcacactaccgcacgccctacccggccatcgcgcgcgaacgcatcctgcagccattgaagatgaccagcacgtcatggggcatcgccaacgtgccggtcgagcgcgcggcggtgccgtacatcggcaaggatggcgcgttgcaaccggccaatgaagatccctggcccaactacggctgggggcatgccgacctgcagaccaccgtgggcgacatgaaccgtttcctgcaggcgctggcgaccggcaagctggtgcgcacggcgaccctggaaaaactctggcagccgcagaagctgagcggtggcggcagcaacttcttctccaccggctgggacaccacccgcagcgacggctacacccaggtcggccacgatggtggcacccgtgtacgtgcgcgattggcctacaagggcacgctggccagcggctactgggtgttcgtgtacctgaccaatggcagcgcccgcaatgtctggtccagcacgctggtggagagcacgatggcggtggttgcgcccggggagtttccgcatgcggtgttgtccgagcggctgatcggctatgcgctggatgacagcaccgatgcgaaaccgcagatgcgtagctggctgcgcgacagcaatggcgttcccaccggcgaactggagcgtgcgatcaacggtgatggctatgccatccgcgagagtcttggtgccagcaaggcgctgaaagtgttcgcgctcaacgccgagctgtatccggattcggccaacgcgtgggacagcctggccgagtgccatgcggcattgggcgatagggaagcggctgatcggctgtacgcgaaggccaagaagctggcgaaaccctcgccataaaccctgctgtagcgccgagcccatgctcggctgatcttcgccgcgatggcagacaacccgcgctgcgcgcgattagccgagcgtgggctcggctctacaggaacacggcgggcggccatacgccgccggcgggtgacgcggcgctgccgacctgttaacttgcgcgccactttcgtggtttacagcattcccgcatgtcgcttccgtcgtaccgccctcacccgtcgctgctgttcctggccgtttcccttggcctcgcctccaccgccgctgcagccccgcaggccaccacgctggatgccgtacaggtcaccgccgccggtaccagcgcgcaggcgcgcgaagcgctgaagcgcatccccggcgccagcaacgtcatcgacgtggccaaggccgacagccgactatccaccagcgccgatgtgctggcctaccagccgggtatcagcgcgcagtcgccgggtaatgagggcaccaagatctcgatccgtggctcgggcatcaaccggggccctggcgcgcacgcctcgggcattgcggtgtcgatcgacggcctgccactgaccggcccgggcggcacgccctacgagctgctggaaccgctgtggctgtcgcgcgtggaagtgctgcgcggcgccaacggcttcgagcgtggcgcgctggcgctgggcggtgccatcgactacgtcagccgcagcggtcgtgattcggcgggcgtgcagctgcactacgaagccggcagccgtggctaccagaagcgcggcatcagctggggcggcgtcagtggtgatgtcgactacttcctggcctacaccgataccgaattcgacggttaccagcgtcatgcgcgcggcgatggcaagggcgcgatggccaacatcggctggcagatcacgcccgacctgcagacgcgtttcttcgtgcgctaccgcgaaaccaatcatgaaacgcccggtcgcctgacccgcgatcagatccgtaacgatccgcgtgccgcgaatgcggccaacctggccatcgatgcgcgtcgcccgcagccgggcagcacctgggtgggcaacgtcaccacgctgcagatcgatgaagactcctcgttgcaggccgggctggtctatcacacgtacccgatggacttgaacgagagcctgtaccggcagcagctggactacgccaacctcaacgccacgctggactaccgccgccgccaccggctgttcggcctggacagcgaaaccacggtcggcctgcgcgtcacccacgatctggacgccgacgtgcgcgagtcgctgcgctttgccagcaacggctatgccgccggcacgcgcacgcgtgacttccggcaccacggcaccgacagcacgctgcacgtcggcaacaccctcaccttcaatgaccgcctgcgcatgcagaccgggctggcactgatcaacacccgtcgcgatgtgcaggtgacctggccgagcagcggtggccgcctgcgcgaccacgactgggactacgcgccgcgactgggcttcacctggcagcacagcgcccagacccagtggttcggcaacctcagccgctcggtggaggcgccgcacccgtggtcgatgatttggggctcgaaccagtacttcgggccaggcaatggcccgtctaccggccgccagcgcgcgccggtgccgatgcagaaccagaccgccaccacgctggaactgggcgcgcgcggtgacgcggcgctgggccgctgggaactgaccggctactacgcgcacgtgaaccacgaactgctgagcgttgaactgcaaccggtgccgaacctgttcatcgccgagaacaacgccagccccaccgttcaccgcggcatcgaggccggattggacagcacgctgtggcgggctgcaccgggccggctgtcgcttcgccaggcctataccttcagcgatttccgctaccgccacgacgcgcgtttcggcagcaaccgcctgcccggcctgccgcgccacgcctaccaggccgagctgcgcttcgatcacgcatccggcctgtacgccgcgctcaataccgaatacgcctcgcgcatcgccgtcgactacgccaacagctactgggccgacagccacgtgatcttcggcagccgcatcggctacgacgcacccggtggccgctggcaggcctgggtggagatgcgcaacatcggcaaccgccactacgccgccacggtcacgccgggttacgacgacgccggcaaggatgtcgcgcgctcgaccccgggcgaaggtcgtggcgtctatgcgggcatgcgctggcgctttgactgattgccgcaggcggcgccgggtgtgatccggcgccgccgttccagtgtcagccgatacgccaggccggcaggcgctcgctgcgcttccagatggaaggcgccaagccgatcagcaccagtgccgccaaccacttcggcgaggtactgagcagtgtcgaggtgagcgagccatcggcgggggcggccatttcctgccacgggttgtagcccaggtagacgacgctgccagcccaccacagcaacgccagaccgacacccaccagcagcagggccagcgtgcggcaggtccagcgctgcgaggtagtgccccattcccgcgacgccgcggtcagcaggcccaccaccagcagcgacaccagtgccaccaggccgatatcgaccttggttccaatgcgctcataggtacaggcgcggcactgcgcctcttccgcggcggtggcggcttcggcgccatcggcctgcccggctgcgggctgcgccagtgctgcaaacggcaacaacgccgccagcagcgtcaccatgatccaacgaaacaacgtcctgttcctgcgtgcagcgacatccatgcgctcttcctcgtcagtggttgtgtgtcccagtgggcgtccggccatccagcgcccctgtttcagatgcagtacgacaagctcccgataggtgacaccgccgggacacgaatcccggccgaccgcgatcatagcctactgttcagtgcagctgaaaacggggcgggtccaggcgatatgaaggagccaaccgcacttcccccctggatgacctgcagcagatggctcgcacccggcacgcattcctgcgcgagccagcccagtacggcgaaaaacagcagcaggccgagcagcggccagatcgtatgcgacacgcatacccgccaccatccctgttcctgcatgccctgcatgcgaggcgatgggctgccaccgcccacatccggcgacagtccctccagtacgttgcccagcgccagcggatccagatccacaccagcagcaggaacacgccataggccagcaacacggccatcgggtagcgaagcaacatcgcgtcgatgccggccaggcgcagcaggtacgaggcaaggaatccggccgcaccggtcagggcgacgatcagggccatctgcaggcgtggccaaccccgctgctgcaggtgctggcgcgcacgcacgacttcgctgccgtggtttacgggcaatttcagtggactgcgtgaaaaatggcgtgagcgcttcattccgccgccgggggccggaggcagcgcggccagggacttcgggaacctgatgctgcatgcggacatccttgccgggcacgcgtaggcggtggtggacggattccagcgcgatggggccgtgggtccatcacccacaggccgcactggcgccggccttgtacccgcgcgccggcggctggatcatgactttccgctacgaaaaagtatgctctacggcatgcacgtctcccagctcacccgctccaccgccctcgtgatgttcgttccaatgattggcctcgccggttggggttcgtggtttggtagccgctgcatcagcgatggctgcctcggcgtcctggtggcatggcttgccgccgtggccacctttgcggtgcaggcattgctggtgctcccgacgcatgcctgggccctcaagcggcagggatcccccgcctcccgcagctacctgcgttggttgggcgcgtcggccatcgctgccttcctgcccatcgggctcggctggggctatctgatgatcttccgatgacctgctgcgcgtcttccgcacgcggatagccggatcaaggacgcgcggccgccttcagcaactgcgctgccacctggtcgaacggggcgatgtcctgcagtgcgcggcacatcgcaaccgcaccctccacactcgcgatcaccaggctggccagctcgttcgcagccgactgttcgtggccgtcggcaatgaaggctgcggcgagatgcccctgccagcgcgcgaacacttcggcagcggcaacgcgtgcctggctgggcacggcctccaccggctcttccactgccgcggccagcaccggacagcccgcgcggaacccggaacgcagcaagcgctcacgccacatcgccaggaactgcggcaggccctgcaccgccccccccttcagcagctccaccagcagcgtttctaccttgtcgccagccatgtgggtggcgcgcgccagcaactcctgcttgccgccgggaaagtggtgataggtggagcccagcggtgcctcggccagcttggtcacctcacggatgctggtggcattgagacccacgcgcgccagcatctgtgccgcagcatcaatcacgcgttgtggcgcatcagaggggcgcgggctcacggcaggctccttgccaggacagtcgtcatagattagcttaccggcgattctataacagtcgtcataaccatgaatctctggttccgcctgctccacctgctgctgtgcagcctgttccggccgaagctggaggcgccgttcggggtctcgcggctgcagttccgggtgctgcccaacgacctggacagcaacctgcacatgaccaacggtcgctactggaacatcttcgatctgggccggctggacctgatcctgcgcatgggcctgggccgggttgcgctgcgcgagaagtgggcaccgatcgtcggcgccggcaccatccagttccgccgcgagctgaagccgttccagcgcttcaccctggaaacgcgcctggtgggctgggtcggctcgcgcggcatcatggagcagcgcgtgctgatcggcgccgagcagaagatcgccacgcgcgcgctgctggtcaccggcatctacgaccggcgtgcgcggcagttcctggccatgccgaagatgatggaagcgatcggcgtggtcgccccgccgtcgccgccgctcagtgcggccgccgaagcgttgctggccgccgatgcggcgttgaagcaggacgacgcctgagcttcagggggccgccaccggcaccgcgtgcggttcgcgcgacacgacctgggtgcgccctcccacgtgcagcacgtactcgaaggactgccgcatgcggctgtatgcgccgccatccggcacgccgtagttggcacccacgctgagggtatgccggcccggcggcaacggcttgagcattacccagtagccgtcggcggcggccagccgagagtgttcgtcgtcggcatccatgcggaagcagccttcgctgcggacccgatgcctgcgcatgtcgcccagtggctggccgtccagcagcaccaccgcgctgatcaggtaatcgttgttgaccgccgcccccgcctgcagctccttgcaggacacagcctcatccacctggtagtgcgccatgttgatgatcggcagcaacaggtacttgccagccggcaccacgcattcgcgatgtggccggaaacggccattggtgccggccaggttccagaccgggccttcctggcccagatcacacacacggccatccgggtcgagatagggcgcgccgccctggccgtcggcccagcgccaccagcgggcggtccattcggccaacgaaacgccgcccaccggttcacgcgtcagcggcgaaggcaccgccgtgtctgcactgaacgccggcacggcggccagcagcaaggccatcgttgcgccactgcggcaaagccatccctggattcccttccgcatcacccaccccatcgttcctggcggccacgcggcgtggccagcttcggcgccactgtaccttggcgggctggatcctgtgcagtgcgggtactgtgcctactccagcgccattgcgcgcttgaccgccgcctcggccaacggcgccatcaccgcatagcccttcgccgtgggatgcacgccgtcgtcggccagctgcggatccagccctccggcggcattggccatcggcgtgtagtagtccagatagaccagctgcttcgcatcggcatagcgcttcaatgccgcgttcaatgcgcgcaccttgggcgcaggtgccgtgcccggcaaccacgggtaatcgctgaccggcagcaccgatgccagcaccacggcaatgccatgtgcacgagccaggtccaccatcgcgtgcaggttgtcttcgatcatcgcctgcgtggacgggccggtgttgccggcgatgtcgttggtgccagccaggatcaccaccacccgcggcttgagtgccagcacgtcctgcgggaaacgcaccagcatctgcgccgtggtctggccgctgatcccgcgattgagccaacccttgccgggaaagaacgtcgcgctgccctccctgccccagccttcggtgatcgagtcaccgaagagcaccacgcgtggttgccccggtacggcggcaggcagtcgcgcgttggcatcgcggtaacgctgcagttccggccaatcggccaggcgctgctgcatgaagcgcacctcgtccgggcgcagtcgctcgacaggttccaccaacaacgggttgacggcgggcacgtcggccgccatcccatgggcgctcatcgcgctaccgagggcaaccgcggccaggccagcggacaaggaacgcatggggtctctccgttgaatgtctgcgccagtctagcgcgcggccgcgcgctcagcgtgccgccgaccgcgccgccacgccggtcaccttggccggcatccacatgcctggcgtccagccactggcggccaggatcgccttcgggttgtcctgctggatcagcgcacgcaccgcgtcacgcttgtccttggcctgcaggtaataggccttggcgatgcgatagcccacccagtagcccagatcatagggttcctgcgaaccgggcctgtagttgtacagccacggcgacagatcggtgctgtccacatccagtgcgaaggcgctttcgatatgtacttcccggccacgggtccaggccgcgtggcgaccgttgccgacattgccggaaatcagctcgccgatgaactcggcgatgccttcgcccagtgaaacacgcagcaccgtcgcatgcgggtcgcccggctcgacgtcggtcaggccggtctgctggatgtgcacgtactcgtgcgcgatcacgtgcacgaagcggtcctgcacattgggattcatgaaatcggctgcgcacagcgcttccaggccgatgatcaccccgctcttggaggtcaacccgaccggtcggccgcggccgaccgcggtggtcaccggcggaaacgcggcctgcggatagatcgcctgcaggttgccgaacacctgcaccaggcgctgcttcaccgccggcagctctgcaaggcaaccgcgtccctgcgcatacaccccgggctggctggcaatggcctcggccatacgctcgggcgtgacccggcgcgccttcgccagttcacccaggcccggactgccttcggccaggtaaccggccagctgggcgatgctgggcttgccgccggtgctgtcgtagagcgcgtagaagcggctggcatcggtggtgaggatctgcggccccggcggggttcccgccgacgccacgccgaccgccccggcacaggccagggcaagcaggcaacgcaggaaactggacatcgctccgtccttggtggagtgcatgcgaagcgcgcaatctaccactccgccccggccaccgcagcgggcacatgcaggcccttcggggctgtgccagactcactcaggcacctgccatggatgatggagcaccgcacgatgatgatcgttcccgcgtactgggccgaagcccgcctgcaggcccgtttccgtggccggccgatggtcgtgcgccgcttcggctggtccgacgaggggcccgcccaagcccaggcccacgccgacgcacgtgcccatgaagccctcaacgccatcatcgccgggcaggtgctgccgcgtcgcgaagtgcgcagcaactacggtgtggagggcgtgccgatccgcgagcagatcgtacagcgcgatggcgatgtcatcatcacccgcaacagctatggcgcgctgtgcctcaacagccccgacgtgctgttcgccgacatcgaccatgcgcagccaccggctggatgtgtgataccggccatcgtcgcggcggtcgtgctgcttgccggcgccgtcatcggcaccgtgctctggcattggctgatgggcctggtactgggtgtggcggcagtgctgctggtcaacgcggcactgctgatgcggcggaagcagcgcctggccgctgccggcggtgctgaagggcttgcgctgaagcgcgtggacgccttcagcgagcagcatcccgattggcatctgcgcgtctaccgcaccccggcggggctgcgcgtgctggcgatgcatgccacgttctcacccgaggacgagcagctccaggcattcttcaaggcactgggcaccgacaccctgtacgcgcgcatgtgccggctgcagcattgcttccgtgcccgactgacaccgaagccgtggcgcgtcggcctgcgttatcgcatcaggccaccggtggctgcgtggtcagccgaacaggcccaaacaacaacccggaccggttggcctggattgccgattacgaaaagaagagtgccggcttcgccgcctgcgcctacctgcgcagcttcggtgataccacccgggtgcatgccaaggccgagcatgtgcgtgacctgcatgaccggctgtcacgcgcgcaggatcgcctaccgctggcgtgagagtggcagacgctcaatcagcgccctgcacgaacggctgccctgccaaggtagtgcccaactgcaccgcgatctgctgcccacccttctcgaaggttgtcgcgcactgctttccgcccttctggcatccgacttccggaaagccctcaagtgactcgggggcgccctgtgccggactcgcctgccaacctgccgcatccagcaggcgcttggccttggcatagggcatgccggcgacgatgcccaattgcgtcagctcagcaggaaacgactgggcatgggcggttgaaaccagggccaacgacaacgttgcagcaaggagaatggctttcatcgcagtgacctgaaacgagctatcaggttcagcctagatcatttgcgtggcgtgcgaatgtgccggtaacacgccgttaccgagtctccacggttgatttcaggacatgtgcaattgatcacatggcggattccctgcccctggcgccacagtccagcgactccatcgcgagatccctgcgcagccggtcatgcaaccagcgcgtctggaaacgcctgcgtgagtcttccccttccggcagcagggcaatcaccgcttcgctcagttccgggtgccactgctcctgcgcgttgtccaggtcctgctgctcgaaaaccaccgagggcaggcgtttccagggcagcatcattaccttctgtgaggtcgacaccagcaccacatccggacgccccggccggctcacgacaaccgtcatcatcggcacatcatcggtccagagcccggagaaatggcggtcgacacgcgactgcaggctccgtccggacagcgccttgcgcgcccacgcgcgctgctgtgcgaacgagcaggcatccgtgtccaagctgtgcagccccgggtccagggacagtatttcggcgcgatccagccgcgaagcgatccgctgcaccgcggccgccctggtcagcggggcggtctgaagcgcggtgtcgagcgccgccatggcgccaaacggcagcagctccggcaatcgcgccttgccgtcgggcctctccaccacctgcacgcgggtggtcaggccataggcatcgcgccggatcacccagtgctccgataccgagccccagccgtaccagtcgtatctcacatcgacgctcatctgtggctgtgccgccatcgccgcagacgatgcgcacaccgctgtcagtcccaacaaccaagtcttcatggagctgccttgcctctggggttccgacgaacggcagccgagcatgggctcggctctacaggatgcaggaaggccgctctgaggcggccttcctgttccttcacttggcgttcttcacgtaggtatcgaaccagttcagcatttccgccaccaactgttcgttcgattccagcgcggtgtaccagtgcggctcgttcggcagcatcaccagccgggtggtgccgccgttaccgcggatcgcctggtacagcttgcgcgactggaacggctcggtgcccgggttggcgtcgtcctcgccgtggaccagcagcagcggcagcttgatcttgtcggcatagaagaacggcgaggccttcaggtacacgtcctgcgcctgccacaccgagcgacgctcgttctggaagccgaacggggtaaaggtcttgttgtacgaaccgctggtcgccacaccggccttgaacagcttggtgtgcgcgatcaggttggcggtcatcaggccgccgtggctgaggccggtcacgccgatgcggttgcggtcaaccacgcccatgtccacggccttgtccaccgccgccttggcgtcggcttccagctgctccaggtaggtgtcgtaggcgttcttcggatcgcccacgatcgggaacgaggcgttgtcgatgatcgcgtagccggccagcagcatcaggcggtacggctgcaggcgggtgaaggtctgctgcgaaccggacacctgccccgcctgcgcggcgttggcgaagtcggccggataggcgtacaggatcgccggcacgcgctggccttccttgtagcccggcggcgtgtacagggtgaacgacaggtccacgccgtcggcgcgcttgtaggtcaccagctgcttcttgatctggcgcacttccggtgtcgggtcgaccagcttggtcagtgcggtcgcggtggacgcgaactgcgcctcgccggccttcgcatcagccaccgcctcaccctgctggcggacgaaggcattcggcggatcgatcaccgactgatgccaggtcaggtagcggcccggcgtgttgctgaaaccgaggaactgttcgtaggcgtctgcactgctgcggaacaggcgctcgctcttcaacgtggccaggtcgaggcggtcgaggaacggacggtcgccctgcggcgaggcaccgcggccgctgaggaacacatggttgccctcacggcgcaccacctgcgcgccattcggcaggcgggtgaagaccagattgccagggttgccgtacagctcatcgctggacatgtcccacagcaggcggccttccttcttcggctggtccacatccacgatgcgggtctgcatccagtgacgattctcgtcgttctcgtactggaaggccacggccggatcggcggtccacgcgaagccttcgaagcgctgcgcggtgcgggtgatttcggtcggcttgccgttgaacggcgccttcagcatcagcacgcgatcgcgatgcggcacgttgaccttccagtcgcccttgtccagcgcttcggcgtagaccagggtagccggatcggtggcgcgccagtcgaaaccgcgcgggccttccggcacgccgtgcaccggcacgcggtcggccagcgggaggctggcgatcggcgtgctgcggccactgctgatatccagcacggccacgtcgttggcgaaacgctggtaggtcaccgcgtgcgaatacggtgccttgatcgattcagtcagcacgtgcacgccatcgggcgcggcgctgacttcgttgaacagtgccggctgcccgaccgggcgcacgctgcctgcggcggtatctaccacggccaactgcgaggcaccgtagtaagcgaacagcttttcgtcgtgcacgctggtcagcgtgtcgcgggcctcataggtgctgctctcgccactgctgcccagcgactcctgtgcatccgggccggtcggtacgccgccgttggacggtgccgggccctggttggccggtaccagtttcaccagcagattctggctgccgcccagccactgcacggtgtagccgaagatcgggttcagctgcacgttcggcacctgcttcacctgcccggtggccgcatcgcccacccacagctgcacgctggtatcgaccgcattctggaaggcgaagtggctgccatcggccgaccacagcgcaccggtggcgcagccctgcggcaggttgaccttggtctccttgccgctgccgatgtcgaccagggtgaagtcggccacgcaggccggaatgccgtagccacccggggtgtcatggcggctgcggttcttcggctccagccgcacgccggccagcttcaggtagggctgggccacgcggctgatcgaggggtaggtctgcgcggtggtcagcagcaggcgctggccgcccggggccacgttcggcgccggcggtggcggtgccttcagcaccttgagcaggtgttccggcggcttggcgtagtcggccaaggccgggccagcggccaacaggccgacggtggcaacggcaacagccgccgccagagaggttcgacggatcagcatccttatcccctgggtgtgaatgggtacccggaatcgggcatggacccgaatctagcaccgcaggggatggggtgaatgggccggaagggctagaggccggatggggcaaagtgggacacgcccggagaggccggcgatggaccggcatctgccaggcgtggtctgtcgtcactgctgggcgtgcaggtcccaagcagtcaggtaatcggggtcgaccacgatcatgccactgttccgcatgcggtattcgcctggctcggcccgctggtactggtcgagcatgggcggcaggtagcgctcatggccatcgtcttcgtcggccagcaccacgccttcgtcggcgctgatgcgcagcacggtgcccgcgtactgctccagaccctgcacttggccgtcgccaccatagcgggtgacacccaccagcacgaccttgccgatcatttcctcggccttggcatcgtccagtgggggcagcatggcattgaattcgtcgttcatcggtgcacctccaaagcctgtggggatagcgtgggttcggcggtcccacgctgccagcgtcgacggcaacgcaggaatctctctcggggcgcaagtagctggatcgcaggcccgaccgggcaacgcgggggtgcgatgggtgaaaggtgtctggaacttggctggaactgcggcggatggccatctgcgccgatggcgtgaccgtgtcaggtcaagatcaacaccacgcgttgcgttgcatacacggtgaagcgtgacagctgcactgtagcggcatgagcgcctcctgttgaaggtcacacgcgggtgcgttgctccgttggaacgaatgctgccactccacgcggaaggaacaagtgaagattgcaggcgacctgcaacaagcggttcgcgcggtacccgttcattaagctggcgccccgctctgctgcggcacgcctgccctggcaggacgctagaatgcgtccatgcgcaccgtacatgccctccgctacatcaccccgttacgggaaggcggctccctgcccgccgtggtcgagaccgacgacgacggcatggccgtgctgaaattccgtggagccggccaaggcccgaaggcgttgatcgccgagctgatcgccggcgagatggcacgcacgctgggcctgccgattccggaaatcctgttcgtcgagctggaccgcgagttcgcccgcaccgagcccgacccggaaatccaggagctgatccgcgccagcgagggcctgaacctgggcctggactatctgcccggtgcgatcaattacgacccggccgcgatgccggtggatgccgagctggcctcgcgcatcgtctggttcgatgcattcaccagcaacgtcgatcgcaccacccgcaaccccaacctgatggtatggcatcgcaagctgtacctgatcgaccacggtgcggccatgtacttccaccacgactgggccagcgccggcgatgcctgcgagaagccgttcgtgctgatccgcgaccacgtgctgctgtcgttcgccagccgcattgccgaggtggacgcagaactggctgcgtgcctgaccaatgccgaaatcgagcgcatcgttggcctggtgccggacagctggctggtggacgaaccggcgttcgacagcccacaggcctatcgccagggctacatcgactatctcaagcaccgcctgaaagtgcgtgcggtgttcgtgcaggaggccatccatgcccacgctgcacacgtatgactatgcggtcatccgcgtcgtgccgcgggtggaacgcgaggaattcatcaatgtcggggtgatcgtctcctgccctggcgcgcgccatctggaggcggccatcgaaatcgatcctgagcgcctgcgtgccttcgcaccggcgctggaccaggacgcgctgcagccatggctggatgcaatcgtggccatctgccgtggcgacgccagcgccggacccatcgcaaagctgcccgcgcgcgcccgctttcatttcctcaccgccaagcgcagctcggttgtgcagatgtcgagcacgcatgtcggccgcactgcggacccggcgggtgtggtggaacacttgatgacgaagatggtgcgggtaccggaatgaacggcacctgccgcgttcacagtggcaaccttcgcgcgatgtagttgaccacattaccgatcgcatccggatcgacattggccaggccaacgatcacgtagccctgcgccggcagcaccacgatggcactgttcgatccgggcgcaccgccttcgtggccgtactgatgctccctgccctcgccctgaaccacgaaaccaaagccataccagcccttgtggttctgcgccgtagtggcctgctgcagcaatgcaggtgaaaccagcttcccgccttgcagtgcctcggcgaatttcaccatatcggccactgtgctgtagccaccaccggccgacatgccgcgccagggcagcgacttcgtttcacggacccattgcccatcgtgcttcgtgtaagcgacggcacgctttggaacgctcgctgtttccggctcgaagccggtgccggtcatgcccaccgggtgcaggatgtgctcctccacatatgcgtagtacgactgcccagataccgcctcgatgatgcgtcccaatacgatgaagccatagttggagtagctgtcctggctgccgggcgtgaactgcggcgcatccctggcgaaccgctgcacgtagtcatccagcgtcttcagggacgcggaatactgttcgaaaccatcgccaaagaagtcccccaggccactggtgtgtgacagcaactcgcgcacggtcacgccgctggcgacagccttgttcggatagtccggcaagtgcttgccgatcgtgtcatcgagactgagcctgccatcctgcaccagctgcaggatggccacggcggtgaacatcttgttggaggacgcaaggcggaactgcgtctccacgcccacttcaattccagtgctgcgatcggcatcaccaccgcgccagtccagcagcaccttcccattctgtgccacctgcaacgcgcccgacagcgcgtcctgtgcccgcagcgcctccagccttgctgtgacgtcggccatcagggcaggcaatgcaacccgtgccggcttgtgcttgtccggcgtttcagtaccctcgatctggaactgcatcaggtgcgacggattggccgggtccatgacggcggtcacccacatcgcgcgttcgttcatctggcccatcaccagcagcttcgcttggccgggtgcactctcggttgattcgagtacgcgcaaggggcctgtgctttcgcggaactcgagatagtccttgggaccgctgccttgcttcttcgcgtatctatcggcgaatgcctgcaacccctcgaggctgcccgcattgaaggccgcaagccagtcaccgatggcgtcctgcgcacgcggatgtgcacgcacgctggagggggcgcccactgccggaacagcccaaagcgtcatcagcaccgaacaggccagtactttgcagagcagcaggcatccaacagccttcatggcagttcctttgcgggtatccctgggcgcatcctagatcatggaaccgcccgctgcatccacgccagggaccctgccgcagcacctcagccgtgacgatgaacgcctcgatgcgatgccaatcgccccgctcatgcggcagcgattccacgcccatgccgatctggtacctcaccgcatccgggccgtcgcgccagtagtacggcgcgccattgctccagccgcaacaggcgtagcgcaatgcaggcatgccaaagggtctcgcgcagataggcttccaccttcactgcctgggtacctggaacgcggtagtgggcctgcatgggtttgatgcaggacgcgtcgtcctggctgcagccgctgtattccagtcccgcaggcttccggcccatcgcctgcaggaaatcctggcattcgatatccggtcgcgccaggccatccgcacgcccctgcgcttcccatgcggccagcgcctgcgcaggcgtctgctgcgcaatcaccttggcggcgaacagcaatgccgccagccccagcagcaagcgcgcgctacgcagcggcaaccggccaatcgtctcagggcgatccttcgcaggcagtcacaggaatgccaaccgatgccgtgctatcgccgtgccatcgtctgctcgctgaagcgtgccacgcagaagtccaggaaactgcgcagcttgggcgtcagctggcggtcgcgcgggtacaccaggttgatccacgtcgacaccggcacgtagtccggcagcacttccaccagttcaccacgcgccagcgcggcggcaagcatttcatggggctgcaggatcaaccccagcccaccgactgccgcggtcagcagcggctcggcctggttgaccatgaagcggctggacaccggcacgctcagcacgctgccgtcagcatcgcggaagctccagcgcgtgcggatgatcgaatgcgcgaagcccaggcactcgtgccgactcagatcggccggatggacaatggccgggcgcgatgcgaggtacgccggcgatgcacacagcaccagcggatacggccccagccgtcgcgccaccagcccactgtcggccagatcaccggtgcggaataccagatcaaagccgtcctcgacgatgtccaccaggctgttggacaggttcagatcaacctgcacgtccgggtactgctgcaggtaggccaccaccgccggccccactgcatgcacgccgaaggtgaccggtgcgctgacgcgcaggcgccccatcggccgcccgcgcgctacttcggccagctgctcggcgccttccacctcctccaggatcacccgcgcacgcgccagataggcctggccgaagtcggtcaggctctgcttgcgcgtggtgcggttgagcaggcgcacgcccaggtgttgttccagcgactgcacgtgtttgccgaccagctgcggcgacaggcccagcgcgtcggcggcagcggcgaaggagccgacctcggccactttgacgaaggtccgcaggggagcgatcaggtccattgcaaacaattggttttcaatgaaacgccagattaccccttattctggaggcaggccacgcgcacagtagcctccacctttccgccggccccagcgccggccttgcccaggagccccccatgagccaggttgtccgcatccacgaatatggcagcgccgatgtgctgcgcatcgacgacatcgatgttcccgcccccgccgccgacgaggtccagatccgggtcaaggccatcggcctgaaccgtgccgaggtgatgttccgcaacggcgcctatctgcaggaggcgcagttccccagccggctgggctatgaagcggccggcatggtcgaggcggtcggcagtgcggtgagcggattcactgctggcgatgcggtgagcgtggtgccgccgctggacatcgcccgctggggtacctacggcgagctggccaacgtgccggcacgactggtggtcaagcacccgcaggcgctgggcttcgaaacggcggctgcggtgtggatgcagtacgtcaccgcctggggcgcactgttggagcaggcgcagctggccgccggggattccgtcatcatcaccgctgccagcagcagcgtcggcctggccgcgatccagatcgccaatgcagtgggtgccacgccgattgcggtgacccgtggcacgggcaagcgccaggccttgctcgatgccggtgccgcccatgtcatcgccacccaggaacaggacctggcagccgaagtggcgcgcatcaccggcggtgccggcgcccgcgtggtgttcgacccgatcggtggcccgcagttcgtgccgctgaccgaggcaatggcccgtggcggcatcctgctggaatacggcgcgctgagcagcgaacccaccccgttcccgttgttcaacgtgctgggcaagtcgctgacgctgaagggctacctgtactcggaaatcgtctccgacgatgccgcgctggcacgtgccaaggcgttcatcgtcgatggcctggacaagggcacgctggcgccgaagatcgcgaaggtgttccccttcgcgcagatccaggacgcccaccgctacctggaatcgaacgaacagatcggcaaagtggtggtgacgctgtaaacaccctgccggcagcgacggacccactgcgggcacgtcgctgccgcaggctcaggccattgaaggcccgcggttctcatgctggcggctttcgagggtgagctggtgctcgcgctgccggttgtcaccggccagatcattcaccgtttcctccatcgagcgcgccggctgtgccgtatccacactggcgcgctcaccgggaatcaacccggcaacccacaggcggtctccggccatcatcacccggtcgacgcgcgcggcatcatcgatgccgttgcgcttggactccagcactgcctgcatgacgtgctcgtcgccgatggtgccaggtaccccctggcggatgcgctcgaacagcgcggcgtccctgggcgacagcgattccatgccattgggctgcggtgcgggctccggcgcggccggaccagcgaccggtgcattcgccgctgcctgctgccgcgcctgcacctgctccggctggaactccgcccgcgtatagggcggacgctgcggcggccagttctccgcgcggtcgaactcggtggtcggcgcatgctcgcgagcgacggcggcatcgttcaactgccggcgcgcatccgcgtcgatgacgccgccggggcgcagcggcaggccatagtcctgctggaagttgcgcatggccgcctgcatgccggcatcaaacgtgcgcgcatcgcgctcggcacgtgggttcggttcggtcaggtaccccaacgcctccagctgccggcgcatttcgaacaccggctcgcccttctcaccggggctcaggttgccgtcggccagcggcccggtcaggtcggtcaccgtccggcgcttgaagtccggatcgaccgccagcgtgtcgctgcgcatgcgttccagcagcgcagcgtcgatgcggccattggccgggctgataccccgctcggtctggaagcggcgcacggcctgctcggtggaggcgccgaaatcaccgtcgggcttgatcgcggcattggcgttgttgcggacgtccaagcgctgcaggtactgctgcgcttccagcacgtgctggttggcgtcaccccggtgcaggtccatcgccccggtgggcgcctggggggtcggcaccggcatctggaagcctggttgctgcacacgctggaccaggccggcaacctgggattcccattcagtggcccgtgtggcgatggcgtctggatagggactgccgttgttcagctcaccgccattgaccgaggcccgcgcctgccggtagtcggcatggttggcgttgacgttgtcggacagccgcgcaccgaacaggccgtcgcgcatccccaccaccagcaccttggtggcgatgtctgcctgggcagcccgttccggatgctcgaccagctcgcggcccatccccagcgcctcgcccagccgctcgtagttgttgacgtgggtgaggtgggcaaagccccggccgaaatactcctcgccgccgaagtagcgcaggtccaccgcctgcttcctgccccagtcttcctcgggcgcggcgaaatcacgcgattcgtgctgcgccgtggccagcacataggcaatctgccgatggtcggtaacgccgttgtcgatgcaggtacgcacgatcatctcgaccgactggtcccgggtcaggccgaagcccgacccaccttttccatagccttcgctcatccttcagctctccagttccggaacgcatccattcgtcgggggaagacctacttcagcaggtccgattcggtaggggcctcgcccctgcaggtgtcatagcggcgctgcagcagcgtgcgcgtgccggttccgcgcagctggatgaccttgtcctcgcgctcgcacgggctgaccttcgcgcgaagcacgaaccgcccattgtcgatatggtcgatgtcgcgcccaccgatggccgcttccaacgccttggcacgcacatagcggttgcgcttggcatcgaacaggtagaacgcatgcaccggaacgttgtagacaccgctgttgtcctgccacacctgcaggtccggcacgccatcaccattgaaatccgaaacggtcagcagcacggcggtcgcaccctgggcaccggtgccggcgcgggtcaggcgcggctgcacgtccgtgaccaccacgttgcgcccaccacgggtcacgcccatgcttcgcacctggcaggtcgtcacgctgtcggtgccgctgcaatcggtcacctggaagaccacctgcagtgccggtgtgagcctgccctcgccgggccgcaggacgatcctgccctgcttgtcgggcgcggcatcggcggcatgcacagcggcctgcgccggcgccggggccgccttggcttccgccaccagcgccgccgcaccgccgccctgcaactggcgggcacgcagcagggtcatgtgcgtgcggcactgctgtgaatccagctgggcaacggccgtgctgccttccgggcaccggttgtcgcgctggcgcagccattgccgctgcagatcgcgcagcacctgctgatcactggcggtcagtgtggagcgcgccgcgctgtaggcggcattgagtgcatcgtcgtgcaccttgagttcagcgtcggcacaacggcgacgggcgtccagcgcggtgcctgcggccgccatgcaaggcgcatgagcggggctcagagagcgcgcatcgcctgcgatcagttcggcaccgctgggcaccttgcgtgcggcgggctggggcgacgcctgcgcgcttgcccacaggcaagggccaagcagaagcagtcctgccagcagccgggtggcacgccccggcaggcgttcggaggtcagcatgcgtttccttccctgggggcgttggccggccccgtcctgttccgatgatggatgctgcccggtcgccagcgcaacttcagcgacagcggtcacagcccgcaggtcgcattcaggccggcagcgctatttcggcagtgcgtaggccatcacgtaatcgccgttcggggtttccatgaaatggtggccgccagccatgatcaccacgtactggcgcccgccctgcgcgtacaccatcggattggcctggccacccgcgggcagcttggcatgccacagctccttgccggtcttcaggtcgatggcgcgcagcaggtcatcagtggcggcggcgatgaagatcaggccgctggcggtgactaccgaaccgccattgttcggcgtgccgatctcgatgggcaggcccgaacggatgccgaatggtccgttgccgcgcgcactgccgaacggacggtcccacagcagcttgccggtgcgcaggtcgatggcccggatgccgccatagggtggctgcttgcacagcagaccagtgaacggcaggcgccaaccggcgttcacctggatggcgtagggcgtgcccacctgtgggtcgcccgcgccttcggcgccgcccttgtcgaaccggaccttctcgcgtggcagccagcccagcctgtcggcctcggcgcgtggcaccagccggttgtagttgggcatgtcgttgtagttggccacgatcacgccgcggcgtgtatcgatggacacacttccccaatccgaaccgccgttgtagccgggatattcgatggaatggcgatcactgctcggcggggtgtagaagccttcgtagtacgccttgcggaactggatgcggcagatcagctggtcgaccggggtgatgccccacatgtcgcgctcggtcaggtcatgctgccggcgcagcgtgtgatacagcgagaacagctgcgtgggtgagcgttgttccggttcgacaccgccgaccggcaccctgcgctcttcggcggcggtcagcagctggccgttgcggcggtcaaggatgtagagatcaccctgcttggtcggcagcaggagcgccggcaccttgccagccgccgtcgggtaatcgatcaggctggcctgcgaacccaggtcgtagtcccacacatccttgcgcaccgcctggaaatgccaggccggcttgccggtggccacatcgatcgccaccagcgacgtcgcatagcggttctggttttccgtgcgtgagccactccagtaatcgccagcggaattgcccagcggcagatagaccagccccagcgcctcatcaccggtcgcggtggtccacatgttcggcgtgccgcgcgtgtaggtctgctcatgcggcggcaggccgctgcgttcgggctggtccatgtcccacgcccagcgcagcttgccggtgatcgcatcgtaggcctggatcacgcccgacggcgcgtcgcggcgctgaccatccagcacctggtggccggtgacgatcaccccgcgcacgatggccggtggcgaggtgatcgacacatagcccggtggcacctcgcccatgcccagagtgatgtcgacctggccgttgttgccgaaattcgcacaggggcggccactgtcggcatccaccgcgatgatgcgcccgtccagcgtgccctcgatgatgcgcgcccagcatgccggacgattgcccggtgcagcgctgcgggtggcactgggcggcggttccggcaacgccagatcagcagcggcatcggccaatgcggcatcggcggggatcggcgtggccggttgctcgtaataactcacgccacggcaggcggcggtgtatggaatcgaagcgtcctttaccttcggatcgaaccgccacacttccttgccgctggccgcatccagtgcaatcaggcggttgcgggcggtgcacaggtacagacggtcgccgatcttcagtggcgtggtttccgcaccccagcgcttcttcggcatatcgccggtgcggaactgccaggccagctgcagcgtggccacgttggccggggtgatctgctgcagcggcgaatagcgggtggcggcattgctgcgcccccacgccggccagtccccttcggcaggctggtcggccggctgcaggccggtggtgtcgcgggtcggttccagcccgacgctggccgcgccttccgggaacggctggtgcccgtccacttcgccgtgcggcgcgaacgccaatccgaaggcagcgacgaacaccagcatcagcacgccggccacgctgcgcgacaggcgcctggaaaccggttggtggagggtgggcgccagcagcgccagcacgatgccaagcgcggtcaccaggccgagccgcggtacccagcgccagtagtcgctgcccgactcccaccaggtccacaacagcgtaccggcgaacaccagcgcatacagcagcgcgccgctgcggcgattgccgaacaacaggaggccactggccagcaggccggccccggcgatggcgtagtacgccgagccgcccaggctgagcagccatgcgccgagcccgccgatgaccaggccgagcaggaccagcagcagcgacagcacggtaacgagaggatgccgggaggcgcggacgggagcaggagcggacggcggcgtggcggacatcgtcgatctccgggggcagcatgcgccgttatcccaccgccgacgtgaagcgcgcgcgtatgtgcggcatccggatacgacgacgccggcacagggccggcgtcgtcgcgtagctcaaccttgcggcaggatcactcctgtgcggcgtcctcgctgctggaagccgccggggcgccatcggtcgtggtcgcggccggagcagaggcaggcactgccacctcatcctcgccctcgtcgatcgaggcatccatgcgctccaccgcctgcagcttctcgtccttggacaggcggatcagggtcacgccctgggtgttgcggccgacgcggctgatttccgagccacgcgtacgcaccagggtgccaccatcggagatcagcaggacttcgtcgctggagcccatcagcactgcggcgaccagcttgccgttgcgctcggtggtctggatgccgatcacgccctgcgtaccacggcccttgcgcgggtagtccggcagcggggtgcgcttgccgtagccgttctcggtggcggtaaggatgtactgaacgctggcgtcgtcggcgccgtcgatcaccgcgtcgccattggcagcggcttcctcgacaccgctgtcgtcctcgttctcgtcctcgctgccaccggcactttcggccacgatcaggctgaccacttcctcgccggccggcatcttgatgccgcgcacgccggtggcagtacggcccatcgagcggaccttgtcctcaccgaagcgcacggtcttgccgttggaggcgaacagcaggatgtcgcgctggccgtcggtcaagccgacgccgaccagcgcatcgccctcgtccaggttgatcgcgatcttgccgcgggccaggcggaaggcgaactcgctcagcggggtcttcttgaccgtaccgttcttcgtggcgaagaacacgaactggccatcggcgtactcgcgcaccggcagcacggcctgcacgcgttcgccgggctccagcgggatccagttgatgatcgggcggccgcgggcgttggaaccggcttcgggcagctggtagaccggcagccagaacaccttgcccgaactggtgaaggtcagcagcgtgtcgtgcgtgttgaccagccacagctgttcgatgaaatcctcttccttggtcgccgccgcgctgcggccacggccaccacggcgctgtgcgcggtatacgctcaccggctgccgcttcacgtaaccggcatgcgacacggtaaccaccacgtcttccggcgcgatcaggtcgaggatgtccaggtcttcttcgctgtggcggatttcggtacgacgttcgtcgccgaattcggccttgacgttgaccagctcctcgcggatcacctgcagcaggcggtcgggatcttccagaatgtggatcagcccggcgatcacttccagcagctgcttgtactcgtcggtcaggcggtcctgctccagcccggtcaggcggtgcagccgcatttccaggatctgggtggcctggatctcggtcagctggtagccgccctcgatcaggcccacgcccttgggcaggtcttccggacgggaggcctcggcaccggccgcacccagcatcgcaccgaccaggcccggctcccacacgcgggccagcatgcgctcgcgggcttcgttcgggttcggcgaggtcttgatcagttcgatcatctcgtcgatgttggccaacgcaacggtcaggccttccagcacgtgggcacgggcgcgcgccttgcgcagctcgaacacggtgcggcgggtgaccacttcgcgacggtggcggacgaacgcctccagcatctgcttgaggttcatcaactgcgggcggccatcgaccagcgccaccatgttgatgccgaacaccgattccatctgcgtctgctggtacaggttgttcagcacaacctcggcagattcaccgcgcttgatctcgatgtagatgcgcatgccatccttgtcggactcatcgcgcagctcgctgatgccttcgatcttcttttccttgaccaactcggcgatcttctcgatcagacgcgccttgttcacctggtaaggaatttcagtgacgatgatcgattcgcggccgttgtcggccacttcgatatcggccttggcacggatgcgcacgcggccacggccggtgcggtagccggcgacgatgccggcagtgccgttgatgatgccggcagtcgggaaatccgggcccgggatgtattccatcaggccgtcgacatcgatgtccgggttgtcgatcagcgcgatgcaggcgttgatcgattcgctcaggttgtgcggcggaatgttggtcgccatgcccaccgcgatgccagccgaaccattgaccagcaggttcgggaaccgggtcggcatgaccgtcggctccagttccttctcatcgtagttgggctggaaatcgacggtttccttgtcgatgtccgccatcagctcatgcgccaggcgcgacatgcgcgcctcggtgtatcgcattgctgcagcggagtcgccgtcgatcgaaccgaagttaccctggccgtcgaccagcatgtagcgcagcgagaacggctgtgccaagcgcaccagcgtgtcgtacaccgactgatcgccatgcgggtggtacttaccgatgacgtcaccgacgatacgcgccgacttgaagtagggcttgttgctgtgcgcgttgagttcgttcatcgcgtacagcacgcggcgatgcaccggcttgaggccgtcgcgcgcatccggcagcgcgcggcccacgatcacgctcatggcgtaatcgaggtagctcttgcgcatctcgtcttccaggttgacctggatgatttccttggcggtttctgccattcgggttccgttgtctggtagcggtccagtccggcgcagccctctgcgggagggggtcgcgccggaacctcgattcaacctgcggatactaccacaacaggccgttttccgcctccctttacggggattttaccggcacaaatcaggaacttagagccccataccgcccctgtagagccgagcccatgctcggctgcgcgaaatcagtagatccacgccgtgcgtggatgaggcctgcctggggtcagagccctttcctgcgaaaagggatccgaccccgggaccttcctgcccgcctcagccgccgaaggcggtgcgcatgttcccggcggtcgggttcaggatgaccccgcgctcggtcacgatggcgtcgatcagctcgcccggggtgacgtcgaacaccgggttccaggcagcaatgccctcggcgacggtacgggtaccccccacgccgtacagctcacccgggtcgcgctgctcgatctcgatctggctgccgtccacggtctccatgtccacggtcgaggacggtgcgaccaccatgaacttgacgccgtggtggcgggcggcgatggccagctggtaggtgccgatcttgttggcggtatcgccattggcgcagatgcggtccgcgcccacgatcacccattgcacggcgccggtcttcatcaggtgcgaggcagccgaatcggcgatcagggtggcatcgatgccgtcctgctgcagttcccacacggtcaggcgtgccccctgcagccacggccgggtctcgccggcgaacacgcgggcgatgcggtgctgggccatgccggcgcggatcacgcccagcgcggtaccgaaccccgcagtggccagcgagccggtattgcagtgggtcagcacgccgctgccagcctcgatcaggcccgcgcccagtgcacccatgtggcggttggcggccaggtcttcctcggcgatggcctgcgcttccgattccagcaacgccttccagtcggcgccggcggcgttcaggcaacggcgcatgcgcgccagcgcccaggccaggttgaccgcagtcgggcgcgatgcattgaggcgctgcagggccggttccagctgctgcagggcgtgcgcaccatcggcggcctgcacctcgcgtgcagccagcacgacaccccaggcagcggcaatgccgatcgccggcgcgccacgcacggtcaatgcgtggatcgcgctggcaacctcgtcgctgtcatggcagaccacgtgctcgaccacgaacggcagcttgcgctggtccagcagttgcagggcatcgccggtccacaggatcgggcggatgtggtcgtaacgggcgtagtcgatgtcagaggcagtgttcatgggcccattgtagggccacgccccgcagggttggagcctgcccgggctcaattcaccgagaattcggcgcggcagccgccgtccacccagatcccgttgcggctccagccccaggtactgccttcctcgcagggcgtgctggacagctgctcggagaccacggcgccaaccgagatgctggcaccgcagaagcgccgcttcttcgacttcgattcgcaggtcaggcggcgcggcatgtcgacgaagcggccatcgtcatcggccacttcgaagtcaccctggcagccacggctggtccagacttcattgcgcttgtagccccagccctgcccttcgcggcacggcaacaccgacaactggcgcagcaggcgcaccggcgcgccatcgagtcgtaccgggcaactctgcggacggccattggactcgcagcgcaccacacggcgcaccaggcgcttgcccgagctgtcagccggcggcgccgcgcccgctgcgcgccgggcgcggaactcggcacggcagcccagggtgacccacacaccactgcggtcagtgccccactcgctgccgcggatgcagctgttgctggacagctggcgcaccaggtcgacgccgttggcaacctcgatatcgcagtgcacccaacccatgtcgcgtgattcgcaggtcaccacttcatcgtcgtagcccacctgctgggccgacgccggcgacggcagccaggcaccccagagcgcaatggagtacaccggtgcagcgacaaccgcgaaccacttgaccaaagccttccccagcaggaatggatgaactggatgccagtgtccggcattggccgtgataagagcatcatcgtgcttaccgacgcaagcgcaccgaacccgcgtttcgttcagcctgcgatgttcagcaacacgcggggatcacgcgtgggcgaagtcgtaggccagcacatcggcgatgcgtggcgtgcggttcatcgccatcaacaggcgatcgacacccaccgccacgccggcacaggcaggcatcgacggcaacgccgacagcagtgcctcgtccacggccggctgcacctgtccacgttcgtggcggcgctgctggtcacgctggaaccgggcgcgctgctcgtgggcgtcgttcagttcgtgatagccgttggccagctccactgcacccaggtacagctcgaaacgctcggccagcggcggcgtgcccggacggatgcgggccagcgcggcctggctggccggccagtcatgcaccacggtcatcaccgcgtcatcgaactgcggctggatgtggtgggtcatcaacaggtccagccagtcatcacgggtcaacccgaccgggtcgatgtgcacgtcgccaagtgcaacacgcagcgcggcttcatcggcctcgaacggatccaggcccacgtgctgctggaacagctcgcggtaactcaacacacgcagcgttgcacggcgtccgaccagggccagcgcctggccgaccaactcggcggtttcctccatcaaccggtggtggtcccagccgacccgataccactccagcatggtgaattccgggttgtggcggccaccggcctcgccgttgcggaacacccggcccagttcgtagcagtcgcccacaccggccgccagcaggcgcttgagcggatattccggcgaagtgcgcagccagcgacgacggccaccggcatcgacatggccggtgaaatcggtatggaagctgtcgatgttcggctcggtgttgcctgccaccgacaggatcggcgtttccacctccagcacatcgcgctcggcgaagaagcggcgcaccagtgcattgagcgtggcgcgctgctgcagcgcgcgcagcagggcctcgctcacaggatgccctccgggcgcggatggtcgagcggcacggtcagcagatcgcgggtgtcgtcgatgtaaccgctggccaggtacaggcggcgggccagttcgttgtggtggttcacctccaggcgcaggcggctgacaccacgcccgcgagcgcgctgttcacagatggccagcgcctgcttgccgcgaccacgaccgcgcgcgcgatgactcaggtacagctcgtccagcagcatgaagtggccgccctgctccaggctgaagcccatcgcgatcaccgcgtagccgaccacctcgccggcctcgtccagccacagcagcacttcgccattgcgcggatcggccagcagcgcgtccacgccgcgacgcacgcgcgcgtcatcgaagtcgatcctgtcttcggcgtagaactcgcgcatcaacgcgatcaacagttcttcgtcggcacgggtggccaggcggaaatccagcggggcggtctgcatcggcgttcctttgtctttcatgccgggcgccaggcacccggcggggtcatcattcgtgttcggcgaggtaggccagcaggcggtcttcgtcccacaccggcacgcccagcgattgcgccttgtccagcttggagccggcctcggtgccggcgaccacgaagctggtcttcttcgacacgctgccggagaccttggcacccagcgcttccaggcgttccttggcggcatcgcgggtgagctgggccagggtgccggtcagcaccacggtctgcccatccagcgggccggccacgatctcggccagcgccggcgccttggccaggatctgctgcatcgccttctcggctgccagcagcatcgcgccatggccatcggcatcgagccagtcggccagaccgcgcgcagtgtcgtccggcaggccggcgttgacgaactggccatgctcggcatccagcaccgcctgggcacccggcaaggcagccaccagcttctccgcacgcaggcgggtgatgccggggatttccgattcgaccagcagttgcgccagatccaggccttcgcgcagcttggcactgggcgcgtgcacatcactgatgcgcacctgcccgacctgcagcaggtcgtcgatggcctgctggttgccctgctgctcgaagaaatggccgagagaacgcgccacttcgccaccgatgtccggcacgcgcttgaacaacggccatggcaggtggcggatcagttccaggtcaccgaaccactgcgccagcgccttggccgtgctctcgccgacgtgctcgatgccaagcgcgaacagcaggcgctccagcgtggctgcgcgactggcgtcgattgccgcgatcaggttgtcggcccatctggtggcgatcttcttcgtgttccattcgaagctggccggctgtgccagcgcctgcgcgcgccacgccggatcgttgccatccagcttgagcaccgcattgagcaccgcgccgctgccttctgccggcaggtgcagcttcagcgtggcggccagtgcggaagggtcctcggcatccagcaccagcttcaggtgcaacagctggtcacggttgagccggtacagatcagccacgctcctgacgatgccggcgtcgaccagggtttcgatgtacttgtcgccgaggccgtcgatatccatcgcacggcgcgaagcgaaatgggcaatggcctccttgcgctgcgccgggcaggacagttcgcccgaacagcgccacgcggctgcaccttcctcgcgcacgatttccgagccgcacaccgggcagcgcgtcggcatctgccagggcgaggcgccctgtggacggcggtcgaggatgacgctgaccacttccggaatcacgtcgccagcacgtcgcacgatcacgctgtcaccgacacgcacatcgagacgcgcgatctgatcggcattgtgcaacgtggcattggacacgatcacgccggccacagccaccggtgccagccgcgcgaccggcgtggcggcaccggtgcggccgatctggatctcgatcgcctccaccgtggtgctctgttcctgtgccgggaacttgtgcgcgatggcccagcgtggcgcacgcgagacaaaccccatggcctgctggccggcgcggtcatccagcttgtagaccacaccatcgatgtcgaacggcaggccatcgcgacgctcgccgatgtcacggtagtagccgagcaggccgtcggcgccttgcaccaccttgcacaacccgctgaccgggaagccccaggcgccgagctgggccagcgtgcccgaatgggtgtccggcagctcgccgccctgcacttcaccggtgccgtaggcgaagaaactcagccggcgctgcgcactgatcttcggatcgagctggcgcagtgaacccgctgccgcgttgcgcgggttggccagcaccttgccgccctgctggcgcgcacgttcgttgtaggcctcgaagtcggcgcgggccatgtacacctcgccacgcacctccagcacatccggccagtccttgccgtgcaggcgcttgggaacatcgccgatttcacgcaggttggcggtcacgtcctcgccggtactgccatcaccgcgggttgcgccgagtacgaaatgaccgtcctcgtagcgcaggctgatcgccaggccatccatcttcggttcggccgagaactgcaggctgcggcggcccaggcgctcatcgatgcggcgcacgaagtcggccacttcctcatcgctgaaggcattggacagcgacagcatcggcaccgcatggcgcacttcggggaagcggccggacgggcgtgcaccgacctgttgggtcgggctgtcggcacgggccagctccgggtgctcgcgctccaacgcttccagctcgcgcaccatccggtcgtagtcgacgtcggggatctccggcgcgtccagctcgtggtaggcgcggttggcctgggcgatctgccggcggagatcttcggcgcgttcggcggggctggggctcatcgggatccggtggttctgggatggccggggattctaccgcgcccggccgtcaggccctgtaacgccccgcctttgcagcgtcgagcgtgctcgacgggcactccccgctccggtaggtgccaaccttggttggcacgtctgtagtcgagcatggctcgacgccacaaaaagcaccttgccgcccgctcacgccggcgctagcgtgcgacggccccatcggaatcctgcccatgaccctgcctgactcccgtagacgcttcctgcagctggccggtgccagccttgccgtcgccggcagcggcctgccgctgcgtggccaggcccaattcgcggccaccgtcggtgcggcccctgccgaaggcgcggtactactgaacttcaacgaatgcccctacggcccctcccccgctgcccagcaggcggcgcgcgacagcatcgccagctgcggccgctaccgcttcgccctggcggcacaggtacgcgatgccttcatcgagcaggcccgtatcccggccgaccatgtgcgcctctatccgggctccagcgaaccgttgaaccgcgccgccacgttgtggaccggcccgcaggcgggactggtggtggccgaccccaccttcgagaccctgggcgaggtcgctgccgcacatggtgcacacgtgcagaaggtgccgctgcgcaatgacggcgcacacgacctgcgtgcgatggtcgcagccgcgcatgcgcgcccgaccgggctgctgtacgtgtgcaatccgaacaacccgaccggttcgatcagcccaccggatgagctcgcctggctgctggcccacaagcctgcttccacccgcgtgctggtcgacgaggcctacctgcaatacagcgagcagcccagcctgatcgcgcaggtggcgcagcgcgacgatctgatcgtgctgcgtaccttctccaagctgtacggcatggccggcctgcgcctgggcctggcggccgcacatcccgagcgtctgcgcgagctggccagccccggcgacaacccgctaccggtgcccgcgctggcggcggcgctggccagcctgcaggatccgcagctgattccgcagcgtcgcctgcagaacgccaaggtgcgccaggccaccatcgcatggctgggcaagcgtggtttcagctgcctgccgtcggaagcgaactgcttcgtggtcgacgtgcaacgcgacggcagcacgttcgccaaggcgatggccgacaacggtgtggtgatcgggcgcagctggccgatctggccgcagcacgtgcgcgtgaccgtcggcagcgaggacgagatggccgcgttccgccgcgcgtttgccaaggtggccggcgtaccggcgtagaccccatccacgcagggcgtggatctactgttgtgggtgccgacagttggtcggggtgggtgccgaccgttggtcggggtgggtgccgaccgttggtcggcacgccatggcgctcaccagcgcggggtcttggtcagcggcggcgcctggtgctggcggtcgtaggcgcgcagctcgtcacggatgtgcgcgatgcgctggcgacccagggcgttgcggctgtcatccagcaccacgccatccagcagttcggccatgcgctgcaccgtcggcagcatcttctcccaggcatccagcgcggtcagcggcgccggcagggtcaggaagaaggcgatggccggggtttccatggcacggatgttggccatgtcgaagctgcctggcttcatgatgctggccatcgagaagatcggcccgcgctcgggatggccttccaccagacggtggaacacgttcatgtggccgaacaccaggccggtcttctccgccgctaccacgatgtcttcgccgcgcagctgctcgccggcccgggcggccacgaacagcgaaacgatcttgtcgaaatcctgggtggcgcgcttgccgagatcgctggcgcccgggtcggtatcgcccaggccgagttcggcctgttcgccttccgtgcccatgcccggttcgacgcggccatcggccacgacaacgccgtcctcgcccaataccggttcgcggcgctcgccgctggccggttccgcgctttccacgcggcgtccttggggcttcttcttcggacggccaaacaggaagatcgcggcgatcaacagcaggccggcggccaggatgccgatgcgcaacagtgccgtgtcggacattcgataggttctccggctagttcattcaggtaactaggatggcacgtcaggccgcgcccgccaatcgcgcggcttcttccaggtccacgctgaccaggcggctgacgcccggttcacgcatggtcacgcccgagagctggtgcgcggcctccatcgtcgccttgttatggctgacgaacaggaactgcaccttctcgctcatttccttgaccatgttggccagccggccgacgttggcttcgtccagcggcgcgtccacctcgtccagcaggcagaatggcgcggggttcagctggaagatggcgaacaccagcgccactgccgtcatcgccttctcgccgccggacagcagcgagatgctggacacgcgcttgcccggcgggcgcgccatgatggtcacaccggtgtcgagcaggtcttcaccggtcagctccaggtaggcgtggccgccaccgaacaggcgcgggtacagcgcctgcacgccagcattgacgcggtcgaaggtgtccttgaaacggccgcgggtctcgcggtcgatcttgcggatggcatcctcgagggtttccagcgccgtagtcaggtcggtgtgctgcgaatccaggtaatccgagcgctgcgaagcctcgccgtactcgtggatggccgcaaggttgaccggctccagccggcgcatgcgtgcgtcgatctgatgcacggcctgctcccagtcgcccaggcgcgcatcctcggggagtgcgttgagcacgtcctgcagcacgaagccggccttttccaccgccgcctgcagggtgtccgcgctgagcaccagtgcctgctggtccagcttgcgctgcgaaatacgctcgcgctgggccagcgcctgttcgtcacgctggtgacgggtctgctcgtaattgcgcagctcggcgtcgatgccgtccagcaacgtacgcgcttcggtcagcacgcgatccgcccgcacgcgctcttccagtgcattctggtgctcggcctgcaacgattcgaccggcgaatcaccttcgtccagctgtgaatgcagctcgcccagccgcgaatccagctgcccgcgctgggtgcccatgcgctccagcgcctggctcaacgaggccagctgcgcacgctgcgattccagggtcagggccagcgaatgcgagcgctcgcgcactgcacgggcagcatcgcgggccaggtcgcgcgcctcggtcagctggcggcgctcgccctccagccgctgccgggtcgactccagatcacccatgctgctgaccgcgttctccaaccgcgagcgcgcttcgcgcgcctgcgcgttgttggcttcaatcgtttcctgcagttgcttcagctcgccttcgatgcggtcgatgcgcgtgcgtgcagcctctaccttgccctgctggccctgcagctggccagccagctcggacaccgcgcgatgggcctggtacagcgcacgctgcgcgtcttcgcgctgctgttcagccgcctgcagctgctcgcggaaaccggccagctgttcttccagctcggcctcgcggtcctgcagctgctcgatctgctcgcgcagctcgttgatctcgcgttcgcgcagtagcgcgccctgctgggctgcaccggagcgcgacacgcgcagccagccctggcccaggcgctcgccgctctgggtgatgatcgaatcgccttccggaaggctggactgcagggccttcgcctcggacaggtccttggcaccatgcaggtgcgccagcaggcgacggatcgccgccgggccacgcacgcgtgcggccagcgacgtcggtgcggccttgacctcggcatccgcgctggcgaccagcgcaatgtggccgtcgccgagttcgccgagggcgttgaccaggctgcccgggtcatcgaccagcacgccttcgatcagctggccgagcgcactttccaccgcgttttcccaaccggcatcgacgtccaggcgttcgccgacacgtgccgccgaatccagcccgcgcgccttcagccacgcgacggccgcgccctgctcctggcccagcgcggcctgctgcagggtttccagcgaggccaggcgaccgcgcaggccgttggcctgcttgcgcagttcggccagttcgttctggccattgcgctgctgttcctgcacggccgccacgccctgcttgcgcagctcgacgtcttcgctcagttcatccagcgcggccttctgcgtgtcgtgctgcaggtgcagctgctcgaaggcttcttccagcgcgtccacgtccagcccggcgcgctcggcggccagggcctcgcgacgccggtcggcgtcgaggatctgcttgtccaggtagtccacgcgcgtgcgctcgacatcaccggcgcgcgacgcctccgaactctgcgaggtgtgctgctcccagcgctgctgccaactggccagccggtcttcggcctcgcgcaggctttcctgcttgatctcgttctcttcctgcagcgcttccagctgcggggtggcggcctccactgcctcgcgcagcaccctcagtttggcctcgtcgccgctgatgtgctggcccagttcggccagggcctgctgggtttcatcgcgcgccttgtgcaggcgctgcgacagctcgcgctggtgctggatctgctgttccaggcgcgccagcgtgctgccgacctggtagaccgcggcctgcgcggtgttgagcgcgtcggcggcctcttcgcgccgcgcgcgcgaggtctcgatgcgggcctcggcatcacgctggtcggcgatcagctgctgcagcttggtctcttcctgcgacaggccttcgcgcagcttcgacaggcgaccgtcgagaccacggaattccagcgccttccactcggcatccttgacccggcgctcttcctgcagggcctggtactgctcggcctgcctggcctggcgcttgaggtgttcgagctgcttgctgatctcgtcgcgcaggtcgcccagccggtccaggttctcgcgggtgtggcggatgcgggtctcggtctccttgcggcgttccttgtacttggagatgccggctgcctcttccaggtacacgcgcaggtcttccgggcgcgcctcgatgatctggctgatcatgccctgctcgatgatcgagtagctgcgcgggcccaggccggtgccgaggaacaggtcggtgatgtcgcgacggcggcacttggtgccgttgaggtaatagttgctggtgccgtcgcggctgaccgtgcgcttgaccgagatttcgttgaacgaggcgtattcgccggagatcgtgtggtcggagttgtcgaagatcagctcgacggtagcctgcgagaccggcttgcgggcattggacccggagaagatcacgtcggtcagcgagtcgccacgcaggcggctggccgaactctcgcccatgacccagcgcacggcatcgatgatgttcgacttgccgcagccattggggcccaccacgccggtcatgttggtcggcaggtgcagggtggtcggatcgacgaacgacttgaagccggacagcttgatcgtggaaagacgcataggggttccggactggggccggcaagcggcctgcgtttaccctccaagtcattgatcctgctgggatcgatgcccgtggaacgggtgtgacgccctgagtataccgatgtggccgtgttctacgaatgggcgtggaacattgtccagccccaccccgtcggccggacgtggccgcacgccacgaaacggagccataaaacaaaacgggcacccttgcgggcgcccgttctgcggtgatgccaggccttgcggcgtgggatcaggcttcggcgacgacgacgaccttgacggtggtctcgacgtcggcgtgcaggtggatcagcacgtcgtactcgccgatgttgcggaaggcgccttcgcccaggatgacttcgctcttgctgaccggcaggccggcagcggtgaaggcatcggcgatttcgcgggcgccgaccgagccgtacagcttgccttcggtcgaagcgttggccgggatggtcacgctcgcgccgtccagcttggccttgcgggcgtcagcgtcggcgtggatggcctgggccttggcttcgtattcggcgcgcttggcttcgaactcggccttgttgctctcggtggccggaacggccttgccctgcggcacgaggaagttacggccgtagcccggcttcacgtcgaccaggtcgcccaggttgccgaggttggtgactttctgcaggaggatcagctgcatggtattgctccagatgagttattcgttagcgaggcgatgccccgcaacaaaggctgtccgaatagctggcacagcgggggcggcaccgggccgccccgccgggcatcagacgtcgtggttgtcggtgtacgggatcagggccaggaagcgagcgcgcttgacggcggtcgccagctggcgctggtacttcgacttggtaccggtgacgcggctcggcacgatcttgccgttctcggtcaggtactggcgcagggtgttgagatccttgtagtcgatctccttcacaccttcagccgtgaacttgcagaacttgcggcgacggaagaacttggacatgggaaggctccttaggcggcggaagcggcgtcgtcgccggcttcgttgtcagcggtggtggtggactcgccctcttcgtcgtcacgacgacggcgctcaccgcgctccggcttgtcacccttctcgtccttgctcttcatgatcagcgactgctcggtgtcagcctcgtcacgcttgatgaccaggttgcgcagcacggcgtcgttgaagcggaagctttcggtcagttcgttcagaacggcctggtcggcttcgatgttcatcagcacgtagtgggccttcaccaggttctggatcgggtacgccagctggcggcggccccagtcttccagacggtggatggtgccgttgccgttctcgaccagcgacttgtagcgctcgatcatggccgggacctgctcgctctggtccgggtggaccatgaacacgatttcgtaatgacgactcatgttttttctacctttcggatgtggccttgcggccggacagccccccgccgttgagaccgcggtggggcaaggattcccgccgggaaggcaggaagccgcgcattatgcggcaagcggcgccaccgggcaaccgggcgcaaaccgggcaacctgaacgggagcgccggcccatgtccggcacgtgctcattccagatcgacgtgaagacgatgctggccgcattccaggcattggaacaggcagccgaccatcatcccgtcccggctcagatgctccagcacccagtcggcgtcgcgcggattgaccgccgccacgtccggccggacctggtcgaggatcggcagcagatcgtcgctgccggcgtagccgaggaaggcgcagggccgttcgcaatggctcaaccagaccgattgctgccaggaggagtagcccggggtgcgctcgcagatctccagcagcagctcacgggcgatggtcggcggcggatcagccggatccggggataccccctcgatatcgctccagccgatgaactccccctcgtaactggccgcagccctgccatcggcgatacaccaggggcacaggtaatccgggcgcaggcgggtgtagaacggtccgcgatagcgcagtgcgcgcgcctgtccgcagcagtcgcagatcccctcgacctcttcgaaggagaggtcgtaggcattggggtgataggtgaaaagcggtcgttccatccgtggggtccctgccgagcccagcgtgccgaccaaggtcggcgcccaccagagcacgcctggtcagcgtcgggccatgcccggtggccggccctcaggccttgtcggcgtcggtggtgaagctctcgccgcagccacactcggcggtggcgttcgggttgctgaacgtgaaggtctcgctcaggccgtgcttgccgaagtcgatcacggtgccgtccaccagggccaggctcttggcgtcgacgtagatcttcacgccatcctgctcgaacaccgtgtcgccctcgcgctcttcgcgggccaggtcggtcacgtggccccagccggagcagccggtcttggtcacgccgaaacgcaggcccagcgcgccgggggtctgggcgacgaagcgctgcacgcgctcgaaggcaatgggggtcaggctgacggccatggggctactccagaggtacggggacattataaggagccgttgccacgaaaaatgcctcgcaagcagaacgctgcaaccggtaaactcccgtgttcacagatcgagtcgatcagcagaggattcaagtcatgacggtggtcagcgttgaacatgcgcttgccgggaagatcccggaaggcggcgaagtcacggtacgcggatgggtgcgcacggtgcgcggttcagcgaatctggccttcgtgaatgtgagcgatggctcctgcttcgccccgatccaggtcgtggccggcgacagcctggccaacttcgatgagatcaagcgcctgaccagcggctgctcggtcatcgccaccggcacgctggtgaagtcgcagggcaagggccagtcgttcgagatccaggccagcacgctggacgtggtcggctgggtcgaagacccgctcacctacccgatccagcccaagccgatgtcgccggagttcctgcgcgaagtggcgcacctgcgtccgcgcaccaacctgttcggcgcggtcacccgcatccgcaactgcctggcccaggccgtgcaccgcttcttccacgagaacggcttcaactggatcagcaccccgatcatcaccacctccgacgccgaaggcgccgggcagatgttccgtgtgtccaccctggacatggtgaacctgccgcgtgacgagaagggcgcgatcgatttcagccgcgacttcttcggcaaggaaaccttcctgaccgtgtccggccagctgaacgtcgaggcttactgcctggcgctgagcaaggtctacaccttcggcccgaccttccgcgccgagaacagccacaccacccgccacctggcggagttctggatgatcgagccggaaatcgccttcgccgacctggccgaagacgcgcgcctggccgaagagttcctgaagtacctgttccgcgcagtgctgaacgaacgcagcgacgacctggccttcattgccgagcgcgtggacaagaacgcgatcaccaagctggaagatttcatcaacgcaccgttcgagcgcatcgactacaccgacgcggtcagcctgctgcagaagtccggcaggaagttcgacttcccggtcgaatggggcctggacctgcagaccgagcacgagcgctggctgaccgaggaacacgtcggccgcccggtggtggtgaccaactatccggagcacatcaaggccttctacatgcgcctgaacgacgacggcaggaccgttgccgcgatggacgtgctggccccgggcatcggcgagatcatcggcggcagccagcgcgaagagcgcctggacgtgctggacgcgcgcatggcccagttcggcctggatcgcgagcactacagctggtaccgcgatttccgccgctatggttcggtgccgcacgccggcttcggcctgggcttcgaacgcctggtggtgtacgtctgcgggctgtccaacatccgcgatgcgatcccctacccgcgcgcgccgggcagcgcggacttctaagccccacacgaccacggaggtaccgccccatgaccctgttcttcgccctctgtttcgtcggcgttgcagtggccgggttcagtgccttcgtgatcttctggccgctgaccctggtgcacgtgcgcgaccgccatccggcgctcgccgcgcgcttcggcagcagcgccttcctcaagcccgatgccctggcctggctgctgcgacgcgactatcggcagcaaccggaccgctcgctgtccgggctggcgacaccggcctgggtatcgctgctgaccctgctggccggactgggcatggccgccctgctctggctggcctcgctctggtaatacgctcatgaatgacatcaccgcctcgcgcgacagctggtggctggccagcctcggcaacaccctcatctgggcgcgcctgcgcgttcgcccggccggcaccgccgaagtgctcgacagcgatggcaacacgctgagctacgacagcgaagacaccgcccgttcgcagttgttcgacgccgagttcgtcgagtacgacggcctggacgaggaggacgcactggtgcgcggcttcagcctgcacgaagtgcagccgccgcaggccgacagcgacgagggcctgcgtggccgcatgatccagtcactcggcgggcgcgcctgacccctgcatgttcaccccgcgcgccttcgccgagaccgacctgctctggctggaccgcctgctggcgcgcgacccgttcgttaccgtgctcacccccggcagcgatggcctgccggagctgacccggatgccggtgctgtaccggcgtgacggcgaccagatcgaactgcgcggccactgggcccgcgccaacccgcagtcgcgccacagcggcgcggccaaggtgctggtcgatggaccgcacggttacgtctccgccagctggtatccggacaaggagcccgccgcgcgggtacccacatggaactacgctgctgccgagctgcgtggccagctgcagaccttcgacgatgccggcgcgctggcggagctggtcggcgcgatcagcgaccgcttcgaagccagcgtcggccaggcctggcagttcgatgccacgcgtgccgaacatggcccggagctgcgcgccatcgtcggcttccgtttccaggtcgaacatgtgcagatgaagctcaagctgagccagaaccatcccgacgccaaccagcgtgcggtgatcgccgaactggaacagctgggcaccccctcttccaccgagttggcgcagtggatgcgctggcaccgcgaacaggccgcccgcagcgactgaacgccgcagattcccgcgacgacgcagccggacggctgcggcgcgcccccacccgacgccagggacccgaacatgaaagacatccacaagctgctgcagaacaaccgcgactgggccgaccggatcgagaaggaagaccccgagttcttccaccagctggccaagcagcagcacccggaatacctgtggatcggctgctccgattcgcgcgtgccggccaaccagatcatcggcatggccccgggcgaagtgttcgtgcaccgcaacgtcgccaacgtggtcgcgcacaccgacctgaactgcttgagcgtggtgcagtatgcggtggaccagctgaaggtgaagcacatcctgatcgttggccactacggctgcggcggtgtgcatgcctgcctgcacaacacccgcgtcggcctggccgacaactggctgcgccacgtcggtgacgtgatgcagaagcacaccggcatcctcgatgcgatcgagaccgatgagctcaagcacgcgcgcctgtgcgaactgaacgtgatcgagcaggtggccaacctgtgccgctcgaccatcgtgcaggatgcgtgggcccgcggccagaagctgatggtgcatggctgggtctacagcctgaaggacggacgcgtgcgcgagatgggcatcgacgtcggttcgcaggaagagctgcagcctgcatatgaaaaggccctgtcctacatcccgcgcaagggcaagcgcgactgatcccttacggatgaccatcatgctcgcttcgccgatcaacctgcacgcctggatcgaagagaaccgccacctgctgaagccgccggtgggcaacaagatgatcgacaacggcgatttcatcgtgatggtggtcggcgggccgaattcgcgcaccgactatcactacgacgaaggccccgagtggttctaccagctcgaaggcgagatggtgctgaaggtgcaggaagacggcgcggtgcgcgacatcccgatccgcgccggcgagatcttcctgctgccggcaaaggttccgcactcgccgcggcgcccgcccggtggcatcggcctggtggtcgagcgcaagcgcctgccgcacgagatggacggcgtgatctggcactgcgagcgctgcaaccacaagctgcacgaagagttcttcccgctgcagaacatcgagaccgacctgcccaaggtgtttgcgcgctaccacgccagcctggagctgcgtacctgcagccagtgcgggcacgtggatccgctgccggtgccggcggtgggctgagcccctcgaacggtagtcgcccaccttggtgggcgcttgctcgctcccgccctggtagatgcccaccttggtgggcgctttcttgtacgtgcgccaaccaaggtcggcgactaccggatcacacggcgctggtgccgggccggctgctaccgggccatgccccaggcgctacactggcggtcccgttgcagcctgttgcccgaccatgtccgacctgctcagccgcacccacgccatcgccttggacgccgccgatccgctgcgcccgctgcgcagtgaattcctgattccgcgccatgagggcggcgagcagacctacttcgtaggcaactcgctgggcctgcagccgcgcggcgcgcaggcagcggtgcaggaagtgatgaagcagtggggcgaactggcggtggaaggccacttcaccggcccgacgcagtggctgtcctaccaccgcctggtgagcgcgcagctggcccgcgtggttggcgcgctgcccagcgaagtggtggcgatgaacacgctgagcgtaaacctgcacctgatgatggtcagcttctaccggccgaccacgcagcgcccggtgatcctgatggaagccggcgcgttcccgaccgatcgccacgcggtggaagcccagatccgcttccatggcttcgacccggccgagtgcctggtggaagtgcagccggacgaagccaacggcacgatttcactgaacgccatcgagcgcgccatgaccgaacacggcccgcgcctggcgctggtgctgtggcctggcgtgcagtaccgcaccggccaggccttcgacctcgatgcgatcacccgcgccgcccgcctgcagggcgcacgcatcggcttcgacctggcgcactcggtcggcaacctgccgctgcgcctgcatgacgtggcccccgatttcgccgtgtggtgccattacaagtacctcaacagcggcccgggcgcagtggctggcgccttcgtgcacgagcgccaccaccgcgataccaccctgccgcgctttgctggctggtggggccatgaggaagccacccgcttccagatggcgccgcagttcaccccggccatcggcgccgagggttggcagctgagcaatccaccgatcctcggcctggcaccgctgcgcgcctcgctggacctgttcgagcgcgccggcatggaggcgctgcgcagcaaatcgctggcgctcaccggcatgctcgaagcactggtgcgcgcacgcctgccgcaggtgctggacatcatcaccccggccgatccgcagcgccgcggctgccagttgtcgctgcgcgtgatcggtggccgcgagcgtggccgcgcactgttcgagcacctgcgcggcatcggtgtgctcggcgactggcgcgaacccgacgtgatccgcatctcgcccaccccgctctacaaccgctacctggacgtgcaccacttcgtcgaggaagtggaagcctgggccggcctttgagccggtccctcccctgctgctggacagttcgttgatcgcacatgcttcccgctcgttgagcattatcggtgccggcctggccgggtccctgctggccatcctgctgtcgcggcaaggctggcgcatcaccctgtacgaacgccgcggtgatccgcgcgtggctgattacgagagtggccgctcgattaacctggcattggccgagcgtgggcgcaatgcgctgcgccaggcgggtgtggaggacgaagtgatggcacgcgcggtgatgatgcgcggccgcatggtgcacccccgcgacggcgaaccgcagctgcagcgctatggccgtgatgacagcgaagtgatctggtcgatccaccgcagcgatctgaacaccacgttgctggaactggccgagcaggccggcgccaccgtgcacttccatcggcgcctgcacaccgttgatttcgacgccggttacgcgcgtttcatcgatgaccgcgacgacagcccgcacgacatccgcttcgacaccctgatcggtgccgacggcgccggttcggccctgcgcgcggcgatgaaccgccgtgccccgctgggcgaggacatcgccttcctcgaccactcctacaaggagctggagatccctccggccgccgacggcagcttccgcatcgagcgcaatgcgctgcacatctggccacgcggccattacatgtgcatcgccctgcccaaccacgaaggcaccttcaccgtcaccctgttcctgcccaaccagggcgatcccagcttcgccacggtcaacaccggcgcgcaggccgaggcgctgttcgcgcgggagttcgccgacaccctgccgctgatcccgaacctgcgcgcggactgggaacagcacccgccggggctgctcggcacgctcaccctggagcgctggcaccagcacggtcgcgccgtactgatcggcgatgccgcgcatgcgatggtgccgttccacggccagggcatgaactgcgcgttcgaggactgcgttgcgctggcccgccacctgatggaagcggatgacctggaaggcgcgttcgccgcgttcgaagccgagcgcaagccgaatgcacgtgccatccagcagatggcgctggagaactacctggagatgcgcgaccgtgtcgccgatcctgcgttcctgctgcagcgcgaactggagcaggaactgcagcggcgctggccgacccgcttcgtgccgcactacacgatggtcaccttcctgcacacaccttacgccgaggcgctgcgccgcaccgaactgcaacgcgacatgctggtggccgccaccaccggtcacgattcactggacaacatcgactgggccgcgctggaagcgcagatccacgcgcagctgccggtcctggagggcgcgcactgatggccgacagcttcctgttctacgacctggaaaccttcggccaggacccgcggcgcacgcgcatctcgcagtacgccgcgatccgtaccgatgccgacctcaacgagatcgatacgccggtcagcttcttcgtgcgcccggccgatgacctgctgccctcaccgatggccaccctggttaccggcatcaccccgcagcaggccttggccgagggcatcagcgaggccgaggccttcgaccgcatcaacgaacagctgtcgcgccccggcacctgcgtgctgggctacaacacgctgcgcttcgacgatgaattcgtccgctacgggctgttccgcaatttccacgacccgtacgagcgcgagtggcgcaacggcaattcgcgctgggacctgctggacatgctgcgcctgatgcgcgcgatgcgcccggacggcatccagtggccgctgcgcgaggacggcgccacctcgttcaagctcgagcacctggccgaggccaacaacgtgcgcgagggcgatgcgcacgaagcgctgtccgacgtacgtgccaccatcggcatggcacgcctgttcaagcagtcgcagccgcgcctgtgggagtacgcgctgaagctgcgtgacaagcgcttcgtcggcggcctgctggacgtggccgcgatgaagccggtactgcacatttccatgcgctacccggccagtcgcctgtgcgcggcgccagtactgccgctggcagtgcaccccaccatcaacaaccgggtgatcgtgttcgaccttgaaggcgagatcgacgacctgctggaactgccggccgaggtgatcgcacagcgcctttacctgcgcgccagcgagctgcccgaaggcgtggcgcgggtgccgctgaaggaagtgcatctgaacaaggtgccagcgctgatcgcctggaaccacctgcgcgccgatgaccacgcgcgcctcggcctggacgtggccgcgatcgaggccaaggtggaacggctgcgcgcgttcgccccgcagctggccgagaaggcgcgccaggtctacaaccagccccgcgtcgccaccgtggccgacgtcgatgcctcgctgtacgacggtttcctcggcaacggcgacaaaccgctgcttgcgctggcacgcaccaccgcgcccgagcagctggccgcgctggaaggccgtttccgcgatccgcgcctgccggagctgctgttccgctaccgcgcgcgcaaccaccccgacagcctcgcgccggcggaacgccagcgctggcaggattaccgccgccagcgcctgctcggcgacggcgggctgggcgaactcaacctgccccagtaccggcagcagctcgatgcactggccgccgaagcgcccgacgatgcgcggcgccaggccctgctgcaatcgctgcgcgactggggccagcacctgcaggagacactgtgagcacctacttctcggacgccagtttcaggttcctgcgcagcctggcgcggcacaacgacaaggcctggttcaacgaccaccgccagcagtatgaagaccacgtacggcagccgttcctgcgcctgctgggcgacctgcaaccggccctggccgaggtcagcgaccatttccgtgccgatacgcgcggcgtcggcggctcgctgttccgcatccaccgcgacgcgcgcttctccaacgacaagtcaccgtacaagacctggcagggcgcgcgcctgttccatgagcgccgccgtgaagtagccgcgccttcgttctacgtgcacctgcagccgggcgagagcttcgtcggtgccggcctgtggcatccggaaccggaaacccagcgccgcgtgcgccacttcatcctcgacaacccgggcagctggaaggccgccgcgcacgcaccgggcctgcgcaagcgcttcgatttcgaggagcgcgaaaagctggtgcgtccgccgcgtggcttccccgccgacttcgagttcatcgacgacctcaagcaccgcaactgggtgatgtggcgctcgctggacgacgccaccatgaccggtccgcgcctgctgtccacgctgggcaaggatctggccgcgctcggcccgttcgtcgactacctgtgcgcggcgctggacctggaattctgatgccattggcacagcaacgccgcacgctgggccgcaccggcctggcggtttcgccggtgggcctgggctgttccggcttctgggggcatcgccgattcccggaacaatcggccgcgaacgtggtcgagcatgcactggcacagggcgtgaacctgttggacaccggccacaactactccggtttccacgccgagccgcggctgggccgcatcctgcgcccgttgctgaaacaatacccgcgcgacgcgctggtgatttccagcaaaggcggcacgctgaccggccaggccggcgtcagcggcgccgagcaacgcaatttctcgccggcagccatcatcgccagctgcgaggcttcgctgcgcaatctcggcctggatcacctggacatctaccagttgcacggcgccagcgagcacgacatcaacgacgacctgctggccgcgctgcagcgcctgcgcgaacgcgggttgatccggcacaccggcatcaacacccactcggcctcgaccctgcgctggatgatcgcccatcccgacgccttcgatgtggtgctgctggactacaacgccctgcagcaggaccgcgaaccgctgatcgaccagttgcaggcggtaggcatcggcgtgctggccgggaccgtgctggcgcagggccacctgctgcccgcgcgcccgcgcctgccacggctggccgatggctggtacctggcgcgcgcctggctgaagcccagcagccgccagctgatgcgcagtgcccgccagatgcgccgggcagtggccgcgatccgcagccaacgcccggcccagaccgccttcgcctatgcgctgggccatcccggcgtggccagcggcatccttggcaccacccgtacccgcagcctcgacgaggtgctggcgacgcggctggaagcgctgaccccggccgaacggcaacagctggtcgatgccttcggtgacggccgtggctcgcccagtcattgagtcttcacccggcactgccgccattgcggcagtctggtcggcatgaagaaactcaccgcactcattgtgctgctggtcctggccgtcgccgcctggtggttcggcggcccctacatgaccgtcaatggcctgtccaaggccatcgagcagcgcgacaccgcccgcctggagcgttacgtcgacttcccccgcgtgcgcagcagcctgcgtgcgcagctcaacgactacctggtgcgccaggccggccccgacgtggcatccagcccgttcggcgccctgctctatgggctgggcgaccagcttggcggtgccgcagtggagaccatggtgaccccgaccgggatcggcgcgatgctgcagggccacgtgctgtggaagcgtggccgcaatgaactgcagggcggcgatgccttcggtgcgaccgaaccggcgcggccgctgaagcatgccgagcatcatttcgaggcactggaccgattcgtgatcgacgtcgatcgcggccccggccagccaccgttgaaggtggtgctggagccgcagggcctgcgctggaaggtggtggacctgcagctgggaatgtcgggcagcccttgatcggacccgtggcctgacggcagcgccaaccaaggttggcaactaccggggcatgtggctctggtagatgcccaccttggtgggcatgtggctgtggtagatgcccaccttggtgggcatgggtcctaggcagtgcaaaccaacggttggcacctaccggtcgagtccgccctacccctcgttggcgacgccgtgcggcacgtgaccggcggccacatgctcgcgggcgctgtcgatgttgtgctgcgaatcgtcgaagaagatgtcggcaccgaaggcctgcaggaacgggcccttgtgacggccgcccaggaacagtgcctcgtccaggcgcacgccccactcgcgcagggtgcggatcacccgctcatgcgccggtgccgaacgcgcggtcacgagcgcggtacggatcggcgcgctctcgccggccgggaacacttcctgcagcgtatgcagggccgacaggaagccacggaagggaccgccgctgagcggctcgcgggcgcgctcgcgctcgtggcggccaaacgcttccacgccctgctcgcgcgagatgcgctcgctctcgtcaccgaagatcaccgcgtcaccatcgaaggcgatgcgcagctggccggccgggcgaccagtatcgatctggtcggcggctgccgcagcggtctcgcccggcggcttgggcaggatggttgccgccgcgatgccatgacgcagcgcgctgcgcaccgattcggggttggccgacaggaacaggtcggtaccgaacggcttcacgtacggccaggtcggctcgccggcggtgaaggtcgcgcggatgatgcccagcccatagtgctggatcgaattgaagatgcgcaggccggtatcggccgagttgcgcgacagcaggatcacctcgacccgcgggttctccgggctggcgccctggttcagcgccagcagcttgcgcaccaccgggaaggccacgccggggccgaggatatcgtcctcgtgctggcgctggaattcggcgtaggccgccacgccatcactttcgaacagcgcatggctttcctcgaggtcgaacagcgcgcgcgaggtcaccgcgacggtcagcaaacggggggagttgtcgcccatcggtgggggtccttcaagcggtcggcggggccggccgcccattgtcctcaaaaaacgaactgttcgctcaggatcctgtcttccaggttgtgctccgggtcgaacagcagggtcacgcggcggtccttcgactcgcggatggtcacctcgaccacgtcgcgggtctcgtgcgaatccgccgtgacgctgaccgggcgcttgtacggatcgagcacgcggaagcgcacctcggtatcggccttgaggatcgccccgcgccagcgacgcggccggtacggggccaacggcgtcagcgcgatggtgtgcgagcccagcggcaataccgggccatgcgcggaatagttgtaggcggtgctgcccgccggggtggccaccagcacgccgtcaccgatcagctcggccacgcgttcctggccgttgaggtcgatgccgatatgcgcggcctgccgggtctggcgcagcagcgagacatcgttgtaggccagcgaaccggtactggtgcccgactcggtcagcgccaccatttccagcgggcgcaggttggccggttcggcacgcgcaatgcgggcctgcacgtcgtcgtcgccacggtactggttcatcaggaagccgacggtgcccagcttcatgccgaacaccggcttgcccaggtgcccatgccggtgcagggtctgcagcatgaagccgtcgccccccagcggacacagcacgtcggcctgctccggcgcgtgatcgccataacgcgagaccatcgcggcgcgggccatctgtgcaggttcggtggcgctggccaggaaagcgatgcggggggtgtcgctcatcggtggatccgggtgggtgtgccagcaagagcatacccggtagtgccggccgctggccggcagctgcacccgattgtggtccatgcggttgccggccagcggccggcactacccggcaatgcagaacggccccgctttcgcggggccgttcctccaactgctgcagatcaggagcccccctgagtcaggggggcgcgccaacggcgcgggggtctgggagcatggttggcatggggcccacggtttgcagagcaaaccgtggggcgccagcgcgaatgcgcttacgcaccatgcgcggccagctgacccaggcgctgcaccgcgaccgaaacggtcgggtagtccagggtcttctgctcggccagttcggccagcatcgccagggtgaagcgcaggctgctgtcgtcgcgacccatccaggccgccacctttgcttcggcactgctgcccttggtacccagcacctggcccgccaggttgcggtggttggcggccagctcgtcacgcagcacgccacgtgccaccgcgtgccaacggccattgacctccagcgcatcgacctgctcgaacagccacggcagctgcagggcatcgcccaggcggaagtggaccttggacacgtccaccggcttcagcttgcgggtacgggccagttcgatgatgtcgaacgccggctccaggaagtgcagttcggccagctgctgcgccagcgcggacggcaggcccttttccttccactcggccaccagggcttcgtaggtcggacgctgcgaatccggcagcacacccgaagcaacgcggatgtcgttgaacgggccctggtagcggttgaccgcttcggtgatgccgggcatcgcgccggggcgcgacagcagccagcgcacgaacgagcgctgcagcttccagatcacttccagggcgtcgatctgcaccgactccggcaccttgccgtcgagggcatcgatctgcgcccacagcgcgcgtgcatccagcgtttcacggctgatggtgtaggccttggcgacctcggcgatggaacggccggtgtcttcctgcatgcgcatcaggaaggtggcgcccatgcggttgatggtctggttggtcacggccgtggcgatgatttcgcgcttcaggcggtgacgctccattgcgtcggcatacttcttctgcagcggggtcgggaagtagcgctgcagttccttggacaggtacggatcttccgggatgtccgaatccagcagctgggcgaacgccaccagcttggagtaggacagcagcaccgacagctccggacgggtcaggccctggccgcgcgccttgcgctgcgacagctcggcatcggacggcaggaactcgatctggcgatcaagcaggccctgctgttccagggtacggatgaagtgctgcttggaacccaggcgcttgaccgccatccgctccatcaggctcagcgcctggttctggcggtagttgtcgttgagcaccagctcggcgacttcatcggtcatcgaggccagcagcttgttgcgctgctcgacggtcagcttcttggcccgcaccacatcgttgagcaggatcttgatgttgacttcatggtcggaggtgtcgacaccggccgagttgtcgatgaagtcggtgttgagcagcacgccggcctgcgcggcttcgatgcggcccagctgggtcatgcccaggttgccgccctcgcccaccaccttgcagcgcagctcgccaccgttcacgcgcagcgcgttgttggcacggtcgccgacatcgctgtgctgctcgctggcggccttgacgtaggtaccgatgccgccgttccacagcaggtcgaccggtgccttcaggatcgcgctcatcagctcgttcggcgacagcgccttgacgttctcgtccaggcccagcgcttcacgcacctgcggggtgatctcgatcgacttcagggtgcgcgggtacacgccgccgcccttgctgatcagcttggcatcgtagtccgcccagctcgaacgcggcacggtgaacaggcgctcacgttcgacgaacgtggtggccgcgtccgggttcgggtccaggaagatgtggcggtgatcgaacgcagccaccaggcggatgtggcgcgacagcagcatgccgttgccgaacacgtcgccggacatgtcgccgacgccgaccgcagtgaagtcctggctctggctgtcacggcccagcgcacggaagtggcgcttgaccgactcccacgcaccgcgtgcggtgatgcccatgcccttgtggtcataaccgaccgaaccaccggaggcgaacgcatcgcccatccagaagccgtgcgcgatggccaggccgttggcgatgtcggagaaggtcgcagtgcccttgtcggcggccaccaccaggtacggatcgtccatgtcgtggcgcacgacatccaccggcggcacgatcttgttgttgacgatgttgtcggtgatgtccagcaggccctggatgaacagcttgtagcaggccacgccgttggcgaagatcgcatcacggtcgccgttcaccggcggggtcttggcgaagaagccgcccttcgcgccgaccggcacgatgacggtgttcttgaccatctgtgccttgaccaggcccagcacttcggtacggaagtcttcgcgacggtccgaccagcgcaggccaccacgggcgaccgcgccgaagcgcaggtgggtaccttccacgcgcgggccgtagacgaagatctcgcggtacgggcgcggcttcggcaggtccggcaccagcgccgaatcgaacttgaagctgatgacatggccgtgctggccgttggcatcggtctggtagtagctggtacgcagggtcgcgtcgatcacgcccatgaacgagcgcaggatgcggtcctcgtccaggctggacacgcggtccatcagcttcagcagcgcatcgcgcgcggcctgcatctgcgcgtcgcggtcacccttgcgggcgtcgaccacggtcttgagcaccttcagggtggcatcgtcaccggcagccagcacgtcgaagtgggccttcagctgggcctggccggcggcgatgtcgtccttgctctcgtggccggtggccggatcgaagcgggcttcgaacagctcgaccagcaggcgggccagcagcgggtagcgcgcgaaggtgccttccacgtaggcctgggagaacggcacgccggtctgcagcaggtacttgcagtagccgcgcagcatggcgacctggcgccagtgcaggccggcagccagcaccaggcggttgaagccgtcgttctcggcatcgccgtgccagacgcgggcgaaggtctcgccgaaggcttcatcgacactggcggcatcgatcgcgccggcggtcgactcgacctcgaagtcctgcacgtacaccggggcgttgtcgaccgacaggcggtacggacgctcggcgatcacgcgcaggcccatgttttccatcatcggcagcgcgtccgacagcggaatgtcgtccagctggcgatacagcttcaggcgcaggccatcaccgctttcgcgcggcacggcctgcaggctcaggcgcaggtcgtccgggccggtcagggcgtcgagctggctgacatcgttggcggcaaccgcggtgctgttgtcttcgatgtagccggccggcagcgccttgccgatacgggcggcgatgcgcaggccttcggtctcgccgtggcgggccaccagcgcttcgcgcaggtcgtcctgccagttgcgcagcacctgggccagcttctgctccagttcggcggtatcgacgtcgagcatctcacccggcttcgggcgcacgatcaggtgcacctgggccagcggcgattcgcccagcaccaccgagctgtcgacgtactcgccgtgcagcgcgtccttcagcatcgcttcgatgcgcaggcgcacgtcggtgttgaagcgctcacgcggcaggtagaccagcgcggagatgaaacggctgtacttgtcgcggcgcaggaacaggcggctgcgcacgcgctcctgcaggcccagcacgcccatcgcggtgcggaacagttcgtcctcgctggactggaacagttcttcgcgcggcagggtttccaggatgtggcgcagggccttgccactgtggctggccggggccaggcccgactgcttcatcacgtgctcgtggcgctggcgtaccagcgggatttcccacgggcggcggttgtaggcgctggaggtgaacaggccgaggaagcgctgctcgccgatgatcttgcccttggcgtcgaattccagcacgccgatgtaatccatgtagccagcgcgatgcacgcgcgaacgggcattggtcttggtcaggatcagcgcatccttcagaccggacgtggtgttcaggccctgcgcggccagggtcttgaccggacgggcggcggacttgtccttgccgcgcatcaggcccaggccggtgtcgttcagcggcgccagcacctcttccttgccctgcttctcgacgcggtattcgcggtagccgaagaaggtgaagtggttgtcggcggcccagcgcaggaactcctgtgcttccttgcgcgatgcgtcgtcgaccggcagctggcggctgccgaggtcgtcggccagcgccagcgccttgtccttcatcggctgccagtcgcgcacgatcgcacgcacttcgtccagcgccttgttgatggcctgttcgatggcagccatggcgtcggccggctggcggtcgatctccagcagcatcaccgactcggcatcgccctcgccgaccttgaccagcttgccggccttgtcgcgggtgaagcgcagcaccgggtggcccagcacgtggacacccacgccctgctcggccagcgacatggtgacggtatcgaccaggaacggcatgtcgtcgttgacgatctgcagcacggtgtgcggcgattcccaaccgttggccttcgcagtcggattgaacacgcggacgttggccttgccggccttgcgggcacgggcgaattccagcgtctcagccgcgagcgcggcccactcttcagcgctgtggtgcgggaactcgtccgattccatgcgcttgtagaagtcagtggcgaaggccaccgcttcggcctgtgcggccgcggggtagcgcttgcgcaaggccgtgtacaccggctccagggagaaaccagcggtcactgcgacctccgactctgctggtttcgtcttgtttttcacggtcttggctgcggttttttgcggtttcatggcagagcgatgcgcttgctcagttgggaaaatgaaattgtagccctaccgcacgaaaaggccttgctgcaggacggaataagcagattcgggtttgctgcggtttagacgcctattcagttcgctccggtatggagctggcgcctgcttcagcactgccgacaggatcggcaaagcgtgttaccgaaagacacacgcggcgacgccgattcgattccacaatcctgaactggacggtatagtccaccgcgtgaacccggcctacctccccgttgccctcgacgcgcgcgatgagcgcgtgttcgatgccgtgcgcagactgctggccgagcagggcatgcagatgagcatggacgcagtggcccagcatgccggctgctccaagcagaccctgtactcgcgctacggcagcaagcaggaactgctgcgccgggtgatgcagcgccacgtcggccacgccaccggggccatgctgcgtgcactccgcagtgacgacctgcgtgccagccttctccagttcgccaccgacttcctggagcatttcaaccaaccgcacgtaggacaggcctgccggctgattgcagccgaggcagcccagtttcccgaagaggcgcgtacgctgtaccggcacggtgccggcgcgctggcgcttcatcttgctgaatggattgaaaccgtttgcatgcagggccagctccggcatgacgacccgcacttcatggccgaactgctgctgagcatgatcgccggtcaggatttcgacaaacagcgcttccataccccccatcgtgatgacgcgctcctgcgtcggcgctgggcagagttctccgtcgacagcttcctgcgcgcgttcgcgccacagccgtcgccggccccgtctacaaaccaaccccggagttcctcctgatgaccgccccactccgcacccttgccttgacatgcgccgttgctgtcgcgctggctgcctgcaagaagccggaacagcagacgcccccgccgccggaggtgggcgtgatcgacgccaagccgcagaccctgccgctgcagcgcgagctggtcggccgcctgtcgccgttccgcagcgccgacgtccgcgcacgcgtacccggcgtgctgctcaagcgcgtttaccaggaaggttcgcaggtcaagcagggccagaccctgttcctgatcgacccggcgccgttgcgtgcctcgctcaacgcctccgaggcccagctggcttcggcccgcgccacctacgccaatgccaaggtcgccgccgatcgcgcgcgctcgctggcgccgcagcagttcgtctccaagtccgacctggacaacgccgaatcggccgagcgcaccgccctggccgccgtcaagcaggccgaagcggcagtgacctcttcgcggatcaacctgggctacgccgaagtgaccgcgccgatcagtggcgtggccaacaagcagcaggtcaccgagggcgcgctggtcggccagggcgatgtgaccctgctgaccaccgttgaccagctcgacccgctgtatgtgaacttctcgctgagcgtggatgagctgacccagctgcgcgcgcagcaggccaagggctcgctggcgctgtccggcgacggcaaggccacggtcaacgtcaagctggccgacggcagcacctatggtgagccgggcacgctggacttctcctcgaccacggtcgacccggccaccggtgcggtgtcgctgcgtgcgctgctgccgaacccccagcagatcctgctgccgggcgccttcgtcagcttccaggccaacctgggcgagcgcaacaatgcctacctggtgccgcagcaggcgctgctgcgtgacaccaccggcggctacgtgatggtggtcggtgccgacggcaaggtggtgcgcaagaacgtgaagaccgatggcgcgcagaacggcaactggctggtcagcgacggcctggccgccggtgacaaggtgatcgtggccggcgtgcagaaggtcaaggaaggtgcaccggcggtggccaagccgtggaccccggggcaggacgccaacggcaagcctgccgcaggcggcgccgctccggcgggcgcagcaccggcggcaggcaaggcaccggccgacgcggccaagccggaacaggccgatgcggccaagccggccaccaccgattcgaacaagcagtaacgggaaccttccgtcatgcctaaatttttcatcgaacatccagtcttcgcctgggtggttgcgatcctgatctcgctcagcggcgtgatcgcgatcctcaacctgggcgtggagtcctatcccaacatcgccccgccgcaggtcaccgtctcggcgacctacccgggcgccagcgcggacaccaccgagaaatcggtcacccaggtgatcgagcagcagctgaccggtatcgatcacctgctgtacttcagctcctcgtcggcctccaacggccgcgcgcagatcaccctgaccttcgagaccggcaccgatccggacatcgcccaggtgcaggtgcagaacaaggtttcgctggccacgccacgactgccttcggaagtgacccagcagggcgtggtggtggccaaggccaatgccggcttcctgatggtggtggcgctgcagtccgataccccgaccatcaaccgtgacgccctgaacgacatcgtcggctcgcgcgtgctcgaccaggtctcgcgtatccccggcgtcggcagcacccagcagttcggttccgagtacgccatgaacatctggctgaacccggagaagatgcagggctatggcctgtcggccagccaggtactggccgcggtacgtgcgcagaacgtgcagttcgccgccggtgcgctgggttcggacccgtcgccggaaggccagcacttcaccgccacggtctcggccgaaggccgcttcagctcgccgcaggaattcgagaacatcatcctgcgcgccaacgccgatggctcgcgcgtgctgctcaaggacatcgcccgcgtcgccttcggtgccaacaactacggcttcgacacccagtacaacggcaagccgaccggcgccttcgccatccagctgctgccgggcgccaacgccctgaacgtggccgaagcggtgcgcgccaagatggacgagctgcagcccagtttcccgtccggggtgacctggttctcgccgtacgacagcaccaccttcgtcaagatctcgatccaggaagtggtcaagaccctgtttgaagcggtcctgctggtgttcctggtgatgctgatcttcctgcagaacttccgcgccacactgatcccgaccctggtcatccccgtcgccctgctcggtaccttcctgggcatgtggatgatcggcttcacgatcaaccagctgaccctgttcgcgatggtgctggcgatcggcatcgtggtcgacgatgcgatcgtggtgatcgagaacgtcgaacgcatcatgagcgaggaaggcctggcgccgaagccggccacgcagaaggcgatgacccagatcaccggcgcggtggtggcgatcaccgtcgtgctggcggcggtgttcatcccgtccgccctgcagggcggcgccgccggtgagatctacaagcagttcgccctgaccatcgccatctcgatggcgttctcggcgttcctggcactgggcttcaccccggcgctgtgcgcgaccttcctcaagccgacgcacaacgacaacccgaacatcgtctaccgcaccttcaacaagtactacgacaagatcagccacacctacgtgggccacatcacctcggcggtgcgccatgcgccgcgctggatgatcctgttcgtggtgctgaccgcgctgtgcggcttcctgttcacccgcatgccgggcagcttcctgccggaagaagaccagggctatgcgctggcgatcgtgcagctgccgccgggctcgaccaagggccagaccaacgaagtgttcgcgcagatgcgtggcatcctggaaaagcaggatggctatgaaggcatgctgcaggtggccggcttcagcttcgtcggttccggcgagaacgtgggcatgggcttcatccgcctgaagccgtgggaggaacgcaagttcaccgcgcccgagttcatccagaacatgaacggtgcgttctacggcatcaaggaagcgcagatcttcttggtcaacctgcccaccgtgcagggcctcggccagttcggcggcttcgacatgtggctgcaggaccgcagtggtgccggctacgaacagctgacccaggcgcgcaacatcctgctgggcaaggccgcgcagaagcccgaagccctggtcggcgtgcgtccgaacgggctggagaacgccccgcagctgcagctgcacgtggaccgcgtgcaggcgcagtcgatgggcatgtcggtgtcggacgtgtacagcaccatccagctgatgctggccccggtctatgtcaacgacttcttctacgaaggccgcatcaagcgcgtgaccatgcaggccgatggcccgtaccgcaccggccaggagtcgctgaagagcttctacagcccctccaccctgacccagaacgccgatggcaccaacgcgatgatcccgctcaacacggtggtcaagtccgaatgggtgtcggcaccgccgtcgctgagccgctacaacggctactcggcgatcaacatcgtcggctcgcaggccccaggcaccagctcgggcgaagcgatgcagaccatggagagcatcgtcaacgacgacctgccggccggcttcggctacgactggtccggcatgtcctaccaggaaatcctggccggcaatgccgccacgctgctgctggtgctgtccatcgtggtggtgttcctgtgcctggccgccctgtatgaaagctggtcgatcccggtggcggtgctgctggtggtgccgctgggcgtgctgggcgcactgggcctgtcgatgctgcgcggcctgcccaacgatctgttcttcaagatcggcctgatcaccgtgatcggcctggccgcgaagaacgcgatcctgatcgtggagttcgcggtggagcagcgcgcagccggcaagaacctgcgcgatgccaccatcgaagcggcccgcctgcgcttccgcccgatcctgatgacctcgttcgcgttcatcatgggcgtgatcccgatggcgatctccaccggcgccggcgccaattcccgccacgccatcggtaccggcgtgatcggcggcatgctgttcgccaccctgctcggcctgctgatgatcccggtgttcttcgtggtcgtgcgccgcatgctgggcgacaagctggatgaaccgtccaaggagttcatggaacgccagcgcgacgcggatgctgcacaccgcccggatcgttgatccggcagtgcgctgaaacgaaaaggccccggagcgatccggggcctttttcttgccgcctttgaattcatgccaaccaaggttggcatctaccagggcaacggcatgcccggtagccgccaaccttggtgggcgccgttcgagtcacgtctcagcgcaacagcgcgaccaccacgcacactgccacgattaccaatgcagcccactgcatcggcacgaaaaagaaatgatggggcgccacttcgcccttctgccggggtgcccggttgagccacaggcccagcagcacgttcaccgccgcgccaatgctggcacccagcaacagctgcgagagtggggtgttgcccttggggcctgcgtgcgggaagaaatacgccagcagcaggatcgctgcgatcggcgtgatcagtgtcaggattccccaaccacgatagatcatctgtgcagaccgtatggaaacggcctgcattggaacagatccggcatcgttcggccaagagcacagcgcatccacgcgtggcgtggatcgaccggccgcgccgcccttgcagcggcgcggccgttgcgtctcagcgcagcccggtttcgttgcgggcgatcaccaggcgctggatttccgaggtgccttcatagatctcggtgatcttggcatcacggaagtaacgctccagcggcatctccttcgaataccccatgccgccgtggatctgcaccgcctggtgggtgatccacatcgccgcttccgaggcggtgagcttggcgatggcggcttcgttgctgaagcgcttgccctggcccttcacccaagccgcgcgcaacgtcagcagcagcgctgcatccagcttgcacttcatgtcggcaatcttggcctgggtcatctggaaggtgccgatggcggcaccgaaggccttgcgctccttcacgtactccagggtcgcttcataggcggcacgggcgatgccgatggcctgcgaggcgataccgatgcggccggcatcgagcacgctcatggcgatcttgaagccctcgccctcctggcccagcacgtcctcggcctgcgccacgtaatcgttgaactcgatctcgcaggtggccgaggcgcggatgcccagcttgggctcggtcttgccacgaccgaaaccggccttgtcggtatcgatgatgaaggcggtgatgccgcgcgcgcccttgtccggctcgctcatcgcgaacagcacgatgtacttggccaccgggccggaggtgatccagctcttcttgccattgatgacgaaggtgccgtcggcctgtttcaccgcgcggcagcgcatggcagtggcatcggaaccggactgcggctcggtcagcgcgaacgcgccgatggcggtgccttcggcgatggcacgcacgtaggtctgcttctgctgctcggtaccgtgggtgaggatgccgttgcagaacagcgagttgttgaccgacatgatggtcgagtgagcggcgtcggcggcggcgacctccaccatcgccagcacgtacgcaaccgggtccatgcccgcaccgccgtactcggtcggcacttcgatgcccatcaggccgttctcgcccagcaggcggatgttgtccagcgggaactcgccggtgcggtcatggtgctccgcgctgggggcgatcttttcctgcgcgatgcgccgcgccacgtcctgcagcatcaactgctcttcggtaaagctgaaatccacaacaccctcccgggtacatgaggttatgggccgcatacggcgcgcccaggtgctccgattgtaccgggggccggctgtttccgtacgctggcgacttgaccgcggcagcctcctcggcgaatatatctctatatcgcgataggtagatatttatggatctggaagactggtcgacccgcctgaaggtgttcgccgatgccacccgcgtgcgcctgctggcgctgctggagcaggaggaactgaccgtggccgaactgtcggcaatcacccggctggcgcagccgcgcgtgtccacccacctggcgcgcctgaaggaagccggcctggtccgcgaccgccgtgccggcgtgtcggcctactaccgtttcgacgaagcccagctggacccggcgcagcgtgcattgtggcatgccttgagcaacggaagcgacgacccgttgctgcgccaggatgccgagcgcgtggctgcagtgctggcccatcgcgcctctgaccagaactgggccgacagcgtggccggcgacatggagcgccactactctccgggccgtacctgggaggcgctggcgcgcaccgccttgccgttgctggagaccggcgacgtgctggacatcgcctccggtgacggcgtgctggccgaactggtcgccccccacgccaagcgctacatctgcatcgataccagcgcgcgcgtggtcgccgctgccagcgagcgcctgcgccggctgcccaatgtggaagtccgcgagggtgacatgcatgccctgccgttcaaggacggcagcttcgacctggtggtgctgatgcacgcgctgacctatgccagcaagccggcgcaggccgtaaccgaagccgcacgcgtgctgcgcccgggcggccgcctgctgctgtgcagcctggcccgtcacgagcacaaggcagcggtggaggcctatggccacgtcaacctcggcttcagcgacaaggagctgcgcaagttcgtcgacaaggccggcctgcaggtgtccagcctggaaacggtcacccgcgagaagcgtccgccgcacttcgaagtgatttcgctgatcgccaacaagccctgagcccgagaccaccatgcccgccctgccctggttgcatcctgaccgtgccaacgccctgctcgacgccctgcgcgagcggatcctgatcatcgacggcgcgatgggcacgatgatccagcgccatggcctgcaggaagacgactaccgcggcgagcgattcgccggtggctatgaccatgcgcacggtcccggctgcgaccacggcacacctgaaggccatgacctgaagggcaacaacgacctgctgctgctgacccggccgcaggtcatcgccgacatccataccgcatacctggacgccggggcggatctggtcgagaccaacaccttcaacgccacttcggtcagtcaggccgactaccacctcgaacacctggtgtacgagctgaacaaggccggcgccgccgttgcacgcgcctgctgcgatgcggtggctgcggccacgccgggcaagccgcgcttcgtgatcggggtgatcggtcccaccagccgcaccgcttcgatcagtcccgacgtcaacgatccgggcttccgcaacaccagcttcgacgagttgcgcgacacctatcgcgaagccatcgagggcctgatcgatggcggcgccgacaccctcatggtcgagaccatcttcgacacgctcaatgccaaggccgcgctgtatgcgctggaggaggccttcgacgcgcgtggtgcacgcctgccggtgatgatctccggcaccatcaccgacgcctccgggcgcaccctgtccgggcagaccgccgaggccttccatgcgtcactggcgcatgcgcgcccgctgtcgatcggcttgaactgcgcgctgggcgccgaggcgatgcgcccgcacgtggaaaccctctcgcaggtcgccgactgttacgtcagcgcacatcccaacgccggcctgcccaacgccttcggcgagtacgacgaaacgcctgaagagatggccaccaccctgcgcggcttcgccgaggatggcctgttgaacctggtcggcggctgctgcggctccacccccgaccacatccgtgcgatcgcccgcgccgtggccgggctgccgccgcgcgccctgcccggtgtccaggagcaggccgcatgaatgtcgccgccaccgttccacacttcccgccctcctgctgttgagccgacgcctgccatgacgcctgtccgccctacccgcctgtccggcctggaacccctggtcatcactccggacctgctgttcatcaacgtcggcgaacgcaccaacgtcaccggcagtgcgcagttccgcaagctcatcaaggaaggccgctacgaagaggcggtggacgtggcccgccagcaggtcgccagcggcgcgcagatcctcgacgtcaacatggacgagggcctgatcgattcggaagcggcgatgacccgctacctcaacctgatcatgtccgagccggacatcgcccgcatcccggtcatggtcgactcctccaagtggagcgtgatcgaggccgggctgaagtgcctgcagggcaagagcgtggtcaattcgatctcgctgaaggaaggcgaggcgctgttccgcgaacacgcgcgcaaggtcctgcgctatggcgccgccgcggtggtcatggccttcgatgaaagcgggcaggccgatacctgcgcgcgcaaggtcgagatctgcacccgcgcctaccgcatcctggtcgacgagatcggtttcccgccgcaggacatcatcttcgacccgaacatcttcgccgtcgccaccggcatcgaagagcacgacaactatgcggtggacttcatcgaagccacccgcatcatcaagcagaccctgccgcactgccacgtctccggcggcgtctccaacgtctcgttctcgttccgcggcaacgaaacggtgcgccaggccatccactcggtgttcctctaccacgccatcgccgccggcatggacatgggcatcgtcaacgccggcgccatgccgatctacgacgagctggagcctgagctgcgcgagcgcgtcgaggacgtgatcctcaaccgccgcagcgatgccaccgagcgcctgctggagatcgccgagcgctacaagggcagcaagggcgcggcaaagaccgaggacctggcctggcgcgggaagccggtggcgcagcgcctggcacatgcgctggtgcacggcctggatgcctttgtcgaggaagacaccgagctggcccggcaggcctccagccgcccgctggacgtgatcgagggcccgctgatggacggcatgaacatcgtgggcgacctgttcggtgccggcaagatgttcctgccgcaggtggtgaaatccgcacgcgtgatgaagaaggcggtggcctacctgctgccgtacatcgaggcggagaaggcacgcagcggtgataccgccaagagcaatggcaagatcatcatggccacggtgaagggcgatgtgcatgacatcggcaagaacatcgtcggcgtggtcctggcttgcaacaacttcgaggtggtcgacctgggcgtgatggtgccagcgcagaagatcctcgatgccgcccgcgagcacaacgccgacctggtcggcctgtccggactgatcaccccgtcgctggaggagatgagccacgtcgcccgcgagatggagcgccagggcttcgacctgccgctgctgatcggcggcgccaccacctcgcgcgcgcacaccgcgctgaagatcgacccgcactacaaagcgcctacggtgtgggtgaaggacgcctcgcgcgcggtgggcgtggcccagtcgctgatctcacgcgacctgcgcgaagccttcgtcgcggccaacgaggccgactatgccgagatccgcgcccgccaccgcaaccgtggcgacgccaagcgcctggtgacgctggaacatgcgcgcgcgcagaaattccagggcggctgggacagctacacgccaccggcaccggaacaacccggcctgcacgtgttcgacgactacccgctggacgagctggtcgactacatcgactggacgccgttcttccaggcctgggagctggccggcaagttcccggccatcctcaccgacgagatcgtcggcacccaggccagcgagctgtaccgcgatgcgcgcgcgatgctcgagcgcatcgtcggcgagaagtggctgacggccaaggccgtgttcggcctgtggccggccaacagcatcggcgacgacgtccgcgtgcagcacccgcagggcgaaaccaccctgcacttcctgcgccagcaggtagacaagcctgccgagcgcccggacttctgcctggccgatttcatcgcgcccctcgacagtggcaagcaggactggatcggcgcgttcgcagtcactgccggtatcggcatcgacgcgcacgtcgcgcgcttcgaggccgagcatgacgactacaacgcgatcctgctgaaagcactggccgaccgcctcgccgaggcgctggccgagcgcctgcaccagcgcgtgcgtaccgaattctggggccatgagcgcgccgaggcgctggacaacgacgccctgatcgacgagcagtaccgcggcatccggccggcgcctggctatccggcctgcccggaacacagcgagaaacggcgcctgttcgacctgctgcaggccgaagcaaacgccggcatggaattgaccgagagcttcgcgatgctgcccacggccgctgtctcgggctactacttcagccatccgcagagccagtacttcgtggtcggccggctcagccgcgaacaggtcagcgactacgcccgccgcaagggcgtggaccgcgcccaggccgaacgctggctggcctccaacctcgactacgaccccgaatgacacaaaaaggggacggaggggattaagtcgtttatgcattcgcgacttaattccctccgtccccttttttgcctcatcattccgcgatgaccgttcccgttgcacgcctctccagcttctacctgttctactacgcggcgctgggcgcgttcacgccgtactggagcctgttcctgaccgcgcgcggcatgagcgtgacggccatcagcgtgatgatgggcctgtggtacgccacccgcgtgatcgcgcccagcacctggacctcgctggcggccgcatcgtcacgaccgatccgcctgctgcgcgcgggctgcgtgctgaccctgctcagcttcgcgctattcctgctgccgctgccacagccgtggatgtacccggcgatggtggtgttctgcttcttctacaacgcggtgatgccgcagttcgagtcgatcaccctcacccatctgggcaacgacagccatcgctacgggttgatccgggtctggggctcgctcggcttcatcgccgtcgtgaccctgttcggctggctgatcgaagaagacggcacggccagccacgccgggctgctgccgtggatgatgctgccactgttcgcgctgctggtcgcctcggccttcagcaaccactacgcgcgcggcatcggcaagaccggcggcgacgccagcggcttctggcagatcgtgcgccgaccgccggtgctggcgttcttcctggccgccttcatggagcaactgtctttcggcccgtactacacgttcttttcggtctacatggaccatcacggctaccgcacgtccaccctgggcctgttgtggaccatcggtgtggtcttcgaagtgggcgtgttcttcaccatcggccgcttcttccgccgctatgacgccagctggatgctgttgatcgcgctggtcagttcctgcctgcgctgggccgtgaccgcactgttcccggaaaacctgccggtgatgctgctggcgcagagcgcgcacgcgctgggctttgcggcgttcttcgcagcagcgatgcagatgctggcgacctacttccccggtcgcctcaatgggcatggccaggggctgctgtacggattctcgtccggtgtcggcggtgtgctcggcgcactcattgccggccaactgtggaagatcgacgatggtcgcaccgcgttcctggccggcagcggcttcgccctgattggcgccctgctctgtttcttcgcactgagcctgccgctcatacgtgcgcgacggaacagccgcgtgcgctgacccctgcccggctcagcgctgcaacagcacctgttgcagcgagggcagcagcacccggttgccatgcgcactgagatgatcgccatcgaagaacagcggccgcccatcgcgctgggctggacataacgcgtcgtcgcacagcaccggcatcgggtcccacagcacgccacctggcagtccatcgaccacctgctgcaggctgcccagcatgggtgcccgcaacgtttccatcgcgacgcgcgtgctgtccaggccgttgcggcagacctcgttgcgggcattgaagcggtccgagcagcgataaggaggcgctggcagcactggcttgggcgcctccagcacgatgcgcacgccacgctcggccaggggtctccactgcgcgaccgcctcggccacttcggcgtcgcgtcctgccgcggcctctgccgtcagttcgcccgccagctgcgcctgcgcatcgaacagcacgaactgatcggaaaggcgtggcacgcgcaacgacaccagcaccacggcatcccccggctgcgcgcgccgcgcgatatcggcgaacaccgcggcgtcgaaatcagcgcaaccggcaccggcaccgcgccacttctgcaggctcacctgcgggcatccgccgcggccatagagggagaccgccgagccggtttccagggccagtcgctgcagcagctcgatgtaggccatcgcatgcgaatcaccagcaacgaacacccgcttcggcgcgccaaccggtagcgggcggtcgcagtctccacgggcaaaggtgcgcgcactaccgccttcgaaacgatgcttggcgaccaccagtgcacactcgggatagtcaccggccacgctcttgccattggggtaccaatcggccggatgccggctgaccgtactcaacgacagccgcggcgcctgcaggtagagcactgtctggatgccggcggcgcacagcagtacgaccgcggcggccagcacccaacgcccgggacgcaggcgctgcgccaacgtgccgcggaacggctgttccacccagcgccacgacagccatgacagcagcagcaccaacgccatcgcggcggtcatctgcaagggtgtctgcaggcccacggtccagcgcatcagcacgaacaccggccagtgccacaggtacagcgagtacgacagctggccgatacggcgcatcggggcgctggccaacaggcgcgccacccatgcctgcggatgatgatgcagcgcccacagcaggcccgcggtggcgaaggccggcagcacgccgtcaggccacggtgaccgcccggcacgcgcggaccacaacgcccaccccagcaggcccagcgccaccatggccagcagggagaacaccggcgcggcgcgcttcagtgcctggccggttgccgggtccagcgattcgcgcacatgcagcagctggaacagcagcacgcccacccccagttgccagaggcgggtgctggtggcatagaacgcccacgatggcggcgcctcgcgcagacccagcaccgccgcatgcagcagcgacgccatgctgaccagggcgaacaggcccaggctgatccagcgcccgcgtgcaccgcgcgcccaagccaggaacagcagcgggaacagcaggtagaactgctcttccacgcccagcgaccaggtgtgggtgtagggattgaattcggccctgggtgcgaaatagtcgttgccgatcgctgccagcacccagttgctgaagccgaagaacgccatcagtccggtcctgtcactggcttcgctgagccaggactcgggaatgaacagcacgcttgccacggcagtcagcaacaggcaggccaacagcgccggcgcgatgcgacggatgcggcgcgcatagaagcgcagcatcgactgccccagcgacagcggcggcagccggtgtaccgacgcgctgaccacgaaaccggagatgacgaagaacacatccacgccggtgaacccgcctggcaaccaggccgggtccaggtggaacacgatgacggccagcacggcgatcgcgcgcaggccgtcaatgtgcggcacgtagccacggcttggatcagcggtcatccctacccccacggccgcgacggcagcgcgcccgcggcggtcacgcgtttaccagaccaggtcgtccggcacctggtactgcgggtccgcgtacggatcttcctcggccggcgcattcggatcgaccttcagcgccaccgatgcggcgaacaccgcctcgcactgcgccagcacctcggcggtcaccagcaggtagcggccattgagctggaccacacccagctcaccggcgttgagcgcggtcagctgttcggcggtcacatagatgcgcttgatcttgccgccgtaggggaagtggcgggcaatgtccgccgcttcggcattcaggcccttgtccttcagcagttcttccagcttggccttggcctcgcggcgcacacgcgcctcttcctgcttcaggcgctcggtttcgatgcgctcttccttttccttctgcgcgcggatggcgtaggccttggccaggtccatctcttctgcgctgcgcggcttgcgcgggccctgctggcccgggccacgcgactggccgggcttgcccgggccgccatggccaggaccgcgacgctggccaggcttgtgctcgcccttgccagcgccctgcggctttccattgccgttgccacccttgcccggcgggcggccatcacggcgggggccatcattcttgcgctctggcttgggcgcaggcttgaagcccaggcccatcagctggtcgcggagggtatcgctcataggattcggatcagtagtgcggcggcggcggttcgctcgccggatcggaagaattcagcgcgttgcggaccttgcccagatcttccagcagcacgcgcagcacgtcggcgttgcgcatgccctgcatgcgggcatcggccagcgcatcgctcagttcggccagcgcctgttcctggaaggacacgcgcatttccatttcgaccaggcgcgcttccagcgcctgctcgcgttcggttggcagcagatcagacatgcagcgagcgcccccggccaatgccgtaatacgccaggcccgctgcttccacgtccgccggctcgtacaggttgcggccgtcgaacaccaccgcgtccttcaactgctcgcgcagcgtctggaaatcggggctgcggaactgcttccactcggtcaccacgaccagtgcatcggcgccctgcagcgcctcgctggcattgctgcagaacaccaggtcatcgcgttcaccgaagatgcgctgcgcctcatgcatcgcttccggatcgtaggcacgcaccgtcgcaccgccttcccacagttgcgccagcaggcgtcggctggaggcttcgcgcatgtcgtcggtgtttggcttgaatgccaggccccacacggcaaaggtcttgccacgcacgccttcgtcctcgcccttgtcgtaatggcgctggaccagggcgaacagatggcccttctgcgcatcgttgaccgcttccacggcgttcagcagtttaggctccaggccggcctgctgcgcggtgcgggccagcgcctgcacatccttggggaagcacgagccaccatagccggcgcccgggtagatgaaatgccagccgatgcgcggatccgagccgatgccctggcggacctgctccacatcggcgccgacacgttcggcgatgttggcgatttcgttcatgaacgagatcttggtcgccagcatcgcgttggcggcgtacttggtcagctcggccgaacgcacgtccatttccaccacgcggtcgtggttgcggttgaacggtgcatacaggcgccgcatcaccgccaccgactcggcgctggtcgcaccgatgatgatgcgatccggacgcatgcagtcggcaacggcgtcgccttccttcaggaattccgggttggacaccacgtcgaaggcgatgtcggcgccacgtgccgccagctctgcggcaatggcggcacggaccttgtcggcggtgcccaccggcaccgtcgacttgttgaccaccacggtcggcacgctcatgtgctggccgatggtgcgggccacggccagcacgtactgcagatcagcgctgccatcctcgtccggcggcgtgccgacggcgatgaacacgacctggccgtggccgatcgcggctgcggcatcggtggtgaacgtcagccgcgacgcggcgtgattggccttcaccatcggttccaggcccggctcatagatcgggatgatgccctggttgaggccatcgaccttggcctggtcgatatcgacgcagaccacctggtggccgacatcggccaggcaggtaccggtcaccagccctacgtaaccggtaccgaaaatcgcaacgcgcatgtccgtgctggctccgtggtcgcttacggcaggacgcccagcagctcgacgtcgaacgtcagagtcgcgttcgggccgatcgggccacccggggtgccgttctcaccgtaggcgagctcgcccgggatccagaagcggtacttcgaaccgaccggcatcagcgcgacgccttcggtccagcccttgatcacctggtccaggccgaactcggccggttggcgaccataggagctgtcgaacacggtgccgttgagcagcttgccttcgtagttcacgcgcaccttgctgctcggcagcggacgctcgccgctgcccgggcggatgacctggtactgcaggcccgacggggtggttaccacgcccggctgggtcttgttcttggccaggaacgcattgccttcctcgcggttggtctgcgcggcagcggcggccttggcctgcatttcggcctgcttgctgcccatgaacgcctggatggtggcggtcgcgtcagcttccgtcatcttcggctgacccttgctcaggccggtgctgatcgcgtcaaacagcgaggcgacgtcgatgtcgtccttcagctgtgccagcgacgggccgaccgagtaggaaccgatcatctgcgacaccttgacgcggtcgaccttcggcggctgcgaacccggcgccatgcccggcacctgctgcccgctgcgggccatcacgacctgacgcagtgcggcatcggtggccttggcctgttcctgggtgatctgcggctgcaggccttcgaacgaacgttccacggcggtgcgcagcgcggccacatcgatctcatcggcgatcggggtgaacgacttggcgacgtccaggccgatggcgtagccgagcttctgcttgggggaattcaaggttgcggtctccttggcggctgcgggggcagccggttgttgcgacagagcgacacccgaagtgcccatcgccagaatcagaaccgacgccgcggcgccgcgcattcccatcttcattcgctgcattcctggaagtgtctgggcgccgacgtcggcgcgaaaagaagcattgtcgcacgcatgccgtcgatgtcgaggcatccgtgccggatatcaatgcgtaggagcgacggccagcgccttgtcgatggcggcggtcagctgtggatcgtccggcgtcaccttgctggcgaactgggcgatgaccttgccatcgcggccgaccagatatttgtggaagttccagcctggcgccacgccggtggctgcggtcaaccgctggtacagcggcgtggcctccgcaccgacgacgtgcaccttctcgaacatcgggaacttgacgccataggtaagcgtgcagaaatcctggatctgcttctcgtcacccggttcctggcccttgaaatcgttggacgggaaacccagcacggcaaagccgcggccggcataacgcttctgcagcgcctccaggccttcgtactggggggtatagccgcacttgcttgcggtattgaccaccagcagcacctgcccgtggtagcgctgctgcaggttgacctgctgcttgctggccagcgggcgatagtccaggtccagcagatcggccgccagcacatgggcggaaccggccaggccggccaccagcagggtcaacagggacaggccgcgcagtcggcgcggaacaacggtcggcaggggcatcgagagcagtccgcggtagccattcacagggccggccgatagcggccgggaatcggccgaactatagcaccgggctccgttgccccttgttgcggcgggcgccggcggctttgcgcggcgtggcctttcccgggaggacccaccctcaacggcgcagagatgacatagcatgaacaacgctgaatggaaggcaaggcgtgatctacccgcacgacaattccatttcccttttcaatcaaggggataaggggatatttcagcggtttgaccacccctgccatcagttgggcacggcaaggggttgcacgtaggcgtgccggtgttatagttgcatacaacaccagtcacctgagacagggggagccatgaacgcccggatccgtcgcaacctcaccgcacccgcggccgctgccgtttcgaccctgatcgtgctggcctggctggccatgccaaccgcccccgcctccgccgacagtgcgcaggatgcatccgtttcgccggccgggaacgccgatccctccccctctcccccgcgtcggctgcacagctccctgtccatgccgtatttctcgttcgcacagccgctgaccccacggagctgaatatgagcgacatccagtggagcgacggcgctcccatctaccgtcagttgaaggagcgcgtgatcgccatgatgctcgacggaatcctcaagccgggcgatgccctgccttcggtgcgccaggtggccgccgactaccagctcaaccccatcaccgtttcgcgcgcttaccaggaactggccgatgaaggcctggtcgagaagcgccgcggcctgggcatgttcatgaccgagcaggcggccacgcagctgcgcagcagcgagcgcgagcgctttctcaacgaagaatggccggcggtgctggagcgcatccagcgcctgggcctgagcctcgacgaattgctgccccaggggaaagtctgatgaatagcactgcaagtgaaccggtcatcaccgcccgaggcctgcgcaaggcctacaagaccaccgtggccctcgacaatgccagcttcagcattccgagcgggcgcatcgtcggcctgatcgggcccaacggcgccggcaagaccaccgcgctgaaggccatcctcggcctgacctcggtggaaggtgagttgagcgtgctcggccgcgacccgcggcagcaccgcgacgcgctgatgaacgacatctgcttcattgccgacgtcgccgtgctgccgcgctggctgaaggtccgtgaagcgatcgatttcgtcgccggtgtccatccgcgcttcgaccgtgcccgctgcgagcgtttcctggccaacaccaagctgcagccgaagcagcgcgtgcgcgaactgtccaagggcatgatcgtgcagctgcacctggcgctggtgatggccatcgatgcgcgcatcctggtgctggacgagcccaccctgggcctggacatcctgtaccgcaaggagttctaccagcgcctgctggaagattatttcgacgaacagaagaccatcatcgtcaccacccaccaggtggaggagatcgagcacatcctcagcgacgtcatgttcatccgtgatggtcgcatcgtgctcgatgcagaaatggacgatgtcggccagcgctacaccgagcttctggtcaacgccgaccagctggagaccgcgcgtgcgctgaagccgatcgacgagcgcagcctgacgttcggcaagaccgtaatgctgttcgacggtgtgccgcgcacccagctctccacccttggcgagacccgcagcccgggcctggccgatctgttcgtcgccatcatgaaggggacctacgcatgactgccgtcaaccaccccgtcagcccgatgggcaccctgcgctggctgctcaagcgcgagtactgggagaaccgtggcggtttcctgtatgcgccgctgatcgccggcctgatctcgctggtgatgagcaccgtcggcatcgccttcggcctgtttgcactgaaccgtgcagcacgcaacggcgcactgcatgtcgacggcgagagcgtgaacatcaacggcctggacctggccctgctgacccgcgacatcagcgccaaggacctggccgacctcggcaacggcctcgacctgaccctggtgctcagctcggcctggccgttcctggtgctggccttcgtggtgttcttctactgcctgggcgccctgtacgacgaccgtcgcgaccgcagcatcctgttctggaagtcgctgccgctgtcggacacccagaccgtgctgtccaaggtgatcagcgcactggtcgtggccccgatgatcgcggtgatcgccggcatcatcaccatgttcggcttcatgctggtgatcagcatcgtcgcgctgatgcacggtggcagcccgatgaccctgatctggggtccggccagcccgttgaccctggccgccggtcacctggcctggattccggtctacgccctgtgggccctgcccaccgccggctggctgctgctgtgctcggcctgggcccgtaccaaaccgttcctgtgggcggtgatgctgccgctgttcgccggcgtcattgtcagcaccaccaaggtgatgccgttgatcggcctgaccaccggctggttctggcagaacatcgttggccgactgctgctgggcggcgtgccgggcaccgacctggtgtatcgcctcagcgccgaggaaggcacgcgtcgcgatctcgaatcggtggtcagcctgatgtcgccggcctcgcagctgaagtcgctggcgatgccggaactatggatcggtgccgccgtcggtgtcgtgttcatcgtcctcgccatccgcctgcgcaagcgcgccggcgaaatctgattccatccacccggaggcaccacccatgcgttccctgctcgcctgttctgcgttgttgctgttgcctctgtcggcgctggccgccgatgctccgaactgcaagttcaccgccgcccgcacgctgaagctggatgtggccggcgccaaggcggtggtgctggaggtgaaccagcatgacctgaaggtcgtcgccagcaagggcggtggccagctcgatggccgcgcctgcgcctccagccaggaatggctggaccagctggtactggagcagcgcagggaaggcgacaagctggtcgtcagcctgcgccgcgacggccgccacagcggcatcagcctgggcaacagctatgcgtggctcgacatccgcggcagcgtgcccgacaacctgcccctgcagctcaaggtcggctccggcgatgccagcgtggacaacgcccaatcgctgagcgtggacgtcggctcgggcgacgcgatcgttcgcggcacccgcggcagcatccacgcagcggtgggttcgggtgacctggacatcgacggtggcggctcgctgaacctgctgtcgctcggctccggcgacgtcaaggcgcgcaacatcggcggcgatgcggtcaccggcaccgtcggctccggtgacctgaagatcagcgatgtccgcggcaacgcccggctggacacggtcggttccggcgacatcgggttcaagcgcgtgcaaggcaacgtcgaggtcggcgtggtcggctcgggcgatgtcgacctgtccgacatcggcggcaacgtgcacgtgcgcagccatggttcgggcgacatccaggtcgacggcgtgcgcggcagcctgaccgtcgaccacagcggcagcggcgatgtcggccaccgcaacgtcggcggcacggtcaccctgccccgcaacaagtaaccgccaccggaccaattcgagggagttgccatgaacctgctgcgcctgctgcctgccatcctgctgtgcctgccgctgatcgcctgcggcggcacttcttccacgcccgacaagaccgtcggcaaaagcgtcgccgaagccaccagcggcgtcggccagaccgtcaaggaggccatggttgatgcccgcaaggacatcacccagggcaacatcaacatctccgccgacaagcagccgcgtgcggagatcacgccggatggccacctgctgatcgacggcaaggacgtgccggccaacgaggcccagcgacagcggttgctggagtaccgcggccacgtcgtcgccattgcgatggacggcatggatgtcggcctggccggcgccaagctcggcgccagcgctgccggggaggcactgaagggcatcttcagcggcgacagcgaaggcatcgagaagcggatcaatgccgaggcggagaagatcgaagcccaggccaagcgcatctgcaaccgcttgccggcgatgctggccagccagcaggcactggcgcgcgagctgccggcgttcaagccctacgcaacgatggaccagagtgacgtcgacgactgcggcaaggacaccgtggtcaagcgctaggcctgtgacagatcagcgcacccggccggcagcggtgccccgctgccggccgtcgtgcgccggccggcttacaatggcggccccggaggcccccgaaccgaatgccatgaagaagttgttcctgctgctggccgccctgctctgcctgggcctggtcggctgtgacaaggattaccgcaaccaccgcgccgagcgcggcaagccaaagatctccgtcagcgaaggcatggtcactgtgcgtcgcccgccggcgccgaacatcatcatcctcggcgatggttcgatgaaggtggacgagatccagattccgctggacgaggcacagaagcagatgctgcagaccatgttcggcaagctgcaggtgctgcgccagaacaccctggtcgccgccccggccgatcccaacatgcagccggtgaagatccagccgccggaaggcatggaagtgatcccggccgacctggtccagcgcatccccgagttcaaggactacaccgacaccttcggcaacatcgtcgccgaccgtcgctgaaaaaacgccgccccctgggcggcgtttcctcttgtagaaccgagcccatgctcggcccaggtccaggaagcagccgagcatgggctcggccctacgaccggcagatcaaccgccgccgccaccgccccccgcgtggatgccaccggcagtcaaggcggccgggtccagcaggcggcgcagctcggcttcatccaggccgctgtcctccagcgcgacatccagcaccggacgctgctccttgtaggcacgcttggcaatcgccgccgccttctcgtagccgatgatcgggttcagcgcggtgaccaggatcgggttgcgcgccaatgcttcggcaacgcgatcctcacgcaccttcagcccggcaatcgcgctgtcggccagcaggcgagacacattggccagcaggccaatgccatccagcaggttcaccgcgatcagcggcagggtgacattgagctggaagttgccggtctgcccggccacggtgatcgcggtgtggtggccgatcacctgcgcgcaggccatcaccgtcgcttccggaatcaccgggttgaccttgcccggcatgatcgagctgcccggctgcagcgccggcagttcgatctcgcccagcccggccagcggaccggcgttcatccagcgaagatcgttggcgatcttgatcagcgccaccgccagtgcattgagctggcccgacagttccaccgcgtcatcctgcgcggccaggccctcgaacttgttctcggcgctgtcgaacttgaacccggtctgctgcttcaacgccttggccacctgcgcgccgaagcgcgggtcggcattgatgccggtaccgatggcggtgccgcccagcggcagccggcgcacacgcttgaggctgtcttcgatgcgttcctgtgccgaggccagctgtgccgaccatgcgccgaactcctgctcgaaggtcagcggcatcgcatccatcaggtgcgtgcggccggtcttgaccaccttgcgcaggctgcggcccttcttgtcgagggtcttgcgcaggtgcaccagcgccggcagcagctgctcatgtgccgccagtaccgccgatacgcgcaacgcggtcgggatcacgtcattggagctctgcccctggttgacgtggtcattggggtgcaccgcggtcttgcccgccttgccggcacggttggccagggtggcgatgacctcgttggcattcatgttcgaggacgtgccagaaccggtctggtagacgtcgatcgggaactgcgcgtcccaggtgccggcggccacttcggcggcagcggtctggatggccttggccacgttgttgggcagatggcccagctcggcgttgacgccagcggcagcgcccttgaccaggcccagggcacggatgaaaccgcgcggcatgcgctggcccgacaccgggaaattctgcacggcacgctgggtctgcgcgccccacagggcgtcggcaggcacctgcagctcgcccatgctgtcgtgttcgattctgaaacccttgcttgcagctctgctcattgcatcaactccgcactacttcagttggggaaagggaagcggcggctggcagggtgtcgcttcccgggctggcggctgcgccaacaatactcccttgcccgcagcgtgggatgacgaggacgggccagatcgttccgtccgcagggccgtgttgtagagccgagcccatgctcggctgcccgcggggcgccggattctccgaagcagccgagcgtgggctcggctctacagggcacgccccgccggcacgtcgtagaatatcggccccgccgctcgtcccagccctgccgacatgtccgattccgccctgctcgccctgtccccgctcgatggccgctatgccggcaaggtcgacgccctgcgcccgatcttctccgagtacggcctgatcaaggcccgcatcacggtcgaggtggaatggctgctggccctggccgccgagccgggcatcgtcgaactggctccgttctccgacgctgccatcgcccgcctgcgcgcgctggccgccagcttcagcccggcccaggccgcgcgcgtgaaggagatcgagcgcaccaccaaccatgacgtcaaggcggtggagtacttcatcaaggaacagctgaaggacgacgccgagctggcgccggcgctggaattcgtgcatttcgcctgcaccagcgaagacatcaacaacctcagctacggcctgatgctggaacaggcgcgccgcgaggtgctgttgccgaccctggacggcatcgccagcaccctgcgcaccctggcccacgccgaggctggccagccgatgctgtcgcgcacccacggccagaccgcctcgccgaccaccctgggcaaggaactggccaacgtggtcgcgcgcctggagcgccagcgccggcagattgccgcggtcgaactgaccggcaagatcaacggcgcggtgggcaactacaacgcccacatcgccagctacccggacgtggactggccagccttcgccgagcgcttcgtgaccggcctgggcctggtgttcaacccgtacaccacgcagatcgagccgcacgacaacatcgccgagatcggtgatgccgcacgccgcgccaacatcatcctgatcgacctggcccgtgacatctggggctacgtttcgctgggctacttcaagcagcgcctgaaggaaggcgaagttggttcgtcgacgatgccgcacaaggtcaacccgatcgatttcgagaatgcggaaggcaacttcggcatcgccaacgcgctgttcgagcacttcagcgcgaagctgccgatcagccgctggcagcgtgacctgaccgattccaccgtgctgcgcgcactgggcaccgcgttcggccacagccaggtggcactggattcgctggccaagggcctgggcaagctggaagtgaacccgcagcgcctggacgccgatctggacgcggcctgggaagtgctggccgaggccgtgcagacggtgatgcgccgccacggcctgccgaacccgtacgagcagctgaaggcgctgacccgcggccagggcatcaccgccgagtcgatgcgtgcgttcgtgcaggggctggagctgccggcggatgcgaagcagcgcctgctggagatgaccccgggcagctacaccggcctggctgagtcgctggcgaagaagatttaaggggattcctttgcggcggcggccgcgggcgctgcctgcggcaggcaacggcaacggcaacggcaatagcaacgtcaagagcggctctggattgctgctagctgggtggggcgggaggggccagcgggacacgccgtgaacccatccatgggggctcgatggcgccatccatggcgccaacggtcccgctggcccctcccgccccacctctggcagattcccggtgacggatcgaagagcattgggttgtcgggacggaatttgaaagagggacgcggcttcgccgcgtccctctttgtttgagggtcttttgtagagccgagcccgtgctcggctgcttttgggcgtgggcaacagcaagccgagcgtgggctcggctctacaagggcatgagcaagcgcagcgcgcgacccgctggtgcctttgatcttcttcttccattccgtggcgggccgcgcaggaaactgtcagaggccgggcgggtgggctgcgcgggggtgtccgccgcatggatgcggcggccaagcttacagggacgtacttgcagcgtcccccgcgcagcccacccgcccggccaaacccggcttttgctttcagcgaccaacccagaccccgccacgaggggctccgccgttggccggccccccgcgacaaaccaccgcacgtgcgcaatcccgacgaacggcggacaatggaacccttggcggctcgccacgccgcccctcccgctttccgctgcaaggattcccccatggccgcccgcaagtcctccgcccccctgatcgaagtcaccgcccgccctggccagccgctcggcatggcgccggccaccttcctgcgcgacttctggcagaagcgcccgctgctgatccgcaatgccttcccggatttccagaccccggtacagccggaagacctggccgggctggcctgcgaggaaggtgtgctggcgcgcctgatcgagcacgacaaggcccaggacggctggcgcgtgcgcaccggcccgttccaggaagacgtgttccccgccctgcccgaccacgactggaccctgctggtgcaggacgtggacaagtgggacccggacgtgcgcgccctgatccaacacttcagcttcctgccgcgctggcgcatggatgacgtgatgatcagcttcgccgccaccggcggctcggtcggcgcccatgtcgaccagtacgacgtgttcctgctgcaggcccacggccaccgccgctggcagatcgatgccagcgaatcgatcaagggcaggcagccgccgctgggcttccgcccggacgtggagctgaagctgctgaaggtgttcaagcccacccacgactgggtgctggcgccgggcgacatgctgtacctgccgccgaacgtgccgcaccacggcgtcgccgaagacccctgcctgaccttctcgttcggcatgcgtgcgccgtcttctgccgagctgatcagcgactatctggacaccctgatcgccgatgccgatgagaacatccgctaccaggatgccgacctgaaggtgccggccgacccgaacgaaatcgacacggtggcgatggcgcgggtgatcaccgccctcaacgccatccgcatgaacgacccggacaagctgggtgactggttcggccgtttcatcaccacctaccgtgcagcgggcgaagtgatggcccaccaggccgcgccggccccggaggaagtggtccaggccctggcctcgggcatgctgctgcagcgccacccgtgggcccgcctggcctggcgccgggccaagcgtggcgccagcctgtatgtcagcggccaggacttcgcgctgccggtgaaggacgcgcagcgcctggccggcgccgagcagctcgccgccgccgcctatcgcggcctgtccgacaagggccgtgccgtggtccagcagctgctggtcggtggtgtgttccagctgatcgacccgaatgaggtgtacgaggccgaagacgaggaagacagcgaggatgccgtggtgctcggcgaggtcgtcgaaggccgcgaccgcgtcgaggcgatcgacgccgacgcggtgtccgacgatgtccactccgtgaccgtgcacgacgacggtatcgaggtcatcgtcaacttcgaggacgacgacgaagacgacagcaccggtcgggcctgagccatcgtcatgatccgggtccagcaggtcagccacgccgacgcccacgttgccatccacgacgtgcgccaacgcgtgttcgtgcaggaacagggcatcgccgccgagctggaacgcgatgcgctggacccggtcagtgcccatgtgctggcgctggacagtgacggccagccggtcggcaccggcaggctggctccggacggccgcatcggccgcatggccgtgctggccatccatcgcagcaacggggtcggcgaggccctgctggcggccctggtcgaggccgggcgccggctcggcctggccgaactgcacctgcacgcccagctgcccgcgcgcgatttctatgcacgccagggcttcctgcccgagggcgaggtgttcgaggaagccggcatcggacaccagcagatgcgccgccggctgggcgtggccagcgccatcgacagccgcgccgaggcggtggcgatcaccacggccatcatccaccgcgcccgtcgccagctgtggctgcacagccgccaactggacccggggctgctcgatgcgcccccggtacagtccgccctgcgccgcttcgtcaccgcccgccacgacaagcagctgcgggtgatcgtgcacgacgccgccgcgatcgcgtctgccgggtcgccgctgctggcgctggcccagcgcctgcccagcgtgatccagttccgcgaggtcagcgatccggtcgaccgcgcgctggcctcggcctgcctgctcaacgatgcgggcgacttctactttcgtctgatcggccatcgcctcgacggcgaggccggcatcgcgctgccagcacgttcgcagccgttcgagcagcaattgcagcgtgtctgggaccgttcgcgcgtctgcagcgaactgcgtgcgctcggcatctgagtcggcacagccgaccgaacctgtctggaaccggcaccggcggacgcgggatacctgtggtggtgccccttcgtgtccggttgggggtacaatttggctgtttgaacgcgcccgcgcagggctattcatcttcctgccgggtccttctgaagccataccccacaaagcgaatcaacaccctccatcgtggacaatcaactgaagcagtttgcgcaatcttcgcaactcgccggcggcaacgcctcctatgtcgaggacctgtacgagcagtacctggtctccccggatagtgtcgatcccaaatggaaaacctacttcgacggcttcaagggccgcgaagcaggtgacattccgcactcggccgtcatctcccacattgcggacgcggccaaggatgcgctgaaggccggtaccggtaacggtgcaggcgacgagcgcgagcgcaatgtcggtcgtctgatcaccgcctaccgttcgcgcggccacctggacgcccgcctcgatccgctgggcctggccgcaccggtcaacaccccggatctgggcctgccgttccacagcctgtccgatgccgacctcaacagcgagttcagcactggcggcgtcggcggccagccgcgcatgaagctgcgcgacctgctggcacgcctgaaggcgacctacaccggctcgatcggtgcggagttcatgcacatctccgaggtcgagcagcgccagtggatctacaagaagctggaagcggccggtggcaactaccagctggacgctgacacccagcgccgcaccctggagcgcctgactgcggccgaaggcctggagcgctacctgcacaccaagtacgtcggccagaagcggttctcgctggaaggcggcgattcgctgatcccgatgatggacaccatcatccgcaacgccggcaaggatggcgtcaaggatgtggtgatcggcatggcccaccgtggccgcctgaacgtgctggtcaacaccctgggcaagaacccgcgcaagctgttcgacgagttcgaaggcaagttcgagcacgacgagcacgcctcggccggcgacgtgaagtaccacatgggcttctccgccgacgtcgccaccgatggcggcccggtgcacctggcgctggcgttcaacccgtcgcacctggaaatcgccgacccggtcgtggccggttccgtgcgttcgcgccaggagcgccgcaaggacaccgcgcgcaagcaggtcatgccgatcctgatccacggcgacgcggccttctccggccagggcgtggtcatggaactgttccagatgtcgcaggcccgcggcttcgccgtcggcggcaccgtgcacatcgtggtcaacaaccaggtcggcttcaccacctccaacccgctggatacgcgttccacgcgctatgccaccgacgtggcgaagatgatcgccgcgccggtcctgcacgtgaacggcgatgatccggaagcagtggtgttcgccgcacagctggccttcgagttccgccagacgtttgccaaggacgtggtcatcgacctgatgtgctaccgccgctggggccacaacgaggccgacgaaccggcgatcacccagccgctgatgtaccaggtgatccgcaagcacccgaccacccgcgagatgtacgccgagcagctggaaaaggcgggcgtgatcgccgccggcgccggcaaggcgatggtcgatgcctaccgcgagaagctggacgccggtgaagtgaccaccgagctggccaaggtcgagaagaccccgccgagcagcccgctgttcgtcgattggccgaagctgctggaaggcaagttgtccgacccggtctcgaccaaggtcgagaagaacaagctggtcgagctggccaagctgatcaacaccattcccgatgaagtgcagctgcactcgcgcgtggccaaggtctacgacgaccgccgcaagatggccgccggcgagatcccgggcgactggggctttgccgagaacctggcctacgccaccctgctcgacgaaggccatgcactgcgcctggtcggccaggacgtgggccgcggtacgttcacgcatcgccacgcgatcctgcacgaccagaagaccgacaactactacatgccgctgcggcagctggtggattcgccggagaaggccaccgtcatcgattcgctgctgagcgaagaagcggtgatggcctacgagtacggcttctccaccaccgatccgaacacgctgtgcatctgggaaggccagttcggcgacttcgccaacggtgcccaggtggtgatcgaccagttcatcgccgccggtgaagccaagtggggccgcatttccggcctgaccctgctgctgccgcatggctatgaagggcaaggcccggaacacagctcggcgcgcctggagcgcttcctgcagctgtgcgcgctggagaacatgctggtggtcgtgccgtcgaccccggcccaggccttccacatgctgcgtcgccagctgcacatgaccacccgcaagccgctggtggtgatgtcgccgaagtcgctgctgcgccacaagctggccgtgtcgaccctggacgagctggccaacggcgagttccagcacctgatcggcgacgccaacgcagacgccaagaaggtcaagcgcgtggtgctgtgctcgggcaaggtctattacgacctgctggaggaccagatcaagcgtggccaggacgacgtggcgatcatccgcgtggagcagctgtatccgttcccgcgtgcgctgctggcggccgaactgaagaagtacggcaaggccaccgacgtggtgtggacgcaggaagaaccgcagaaccagggcgcgtggtaccagatccgccaccacctgcagttctgcctggccgatggccagaacctgcactacgccggtcgcgcacgttcggcctcgccggctgccggtcacatggctgaccacgtccgcgagcagcagcagctgatcgccgacgcactggtcaacccgttcaacgacacgttcgctgaataatcctccccctatttagaagacaaaccaggaagctcccgcaatggccaccgaagtcaaagccccggtactgcccgaatccgtcgccgacggcaccatcgccacctggcacaagaaggtgggcgacgccgtcaagcgcgacgaaaacctgcttgacctggaaaccgacaaggtcgtcctggaagtgccgtcgccggtcgacggcgtgctgaaggaaatcaagttcgccgaaggctcgaccgtgacctccagccaggtcgtggcgatcatcgaggaaggcgccgtggcagctgctccggcaccgaccgccgaggccgctccggccgctgctccggccgccgccgctccggctccggccgctgccgctgcgccggccccggccgccaagtcggccgccgatgcgctgccgccgggcgcccgcttcaccgccatcactgaaggcgtgaacccggccgatgtcgacggcaccggccgtcgcggcgcggtcaccaaggaagacatcgtcaacttcgcccgcaacggcggcgccggcaaggccggtggcgcacgcccggaagagcgcgtgccgatgacccgcatccgcaagcgcatcgccgagcgcctgatggagtcgaagaactccaccgcgatgctgaccaccttcaacgaagtcgacctgtccaaggtgtcggcggcgcgcaaggaactgcaggacgagttcgtcaaggcacacggcatcaagctgggcttcatgagcttcttcgtgaaggccgccgccaacgcgctgcagcgcttcccgctggtcaacgcctcgatcgacggcgacgacatcatctatcacggctactcggacatctcgatcgccgtctcgaccgagaagggcctggtcacgccggtgctgcgcaacgtcgagcgcatgtcgttcgccgacatcgagaagaccatcgccgactacgccaagaaggcccgtgacggcaagctgggcctggaagaactgcagggcggcaccttcaccgtgaccaacggcggcaccttcggttcgctgctgtcgaccccgatcatcaacccgccgcagagcgccatcctgggcatgcacgccatcaaggagcgtccgatcgcccagaacggccaggtcgtgatcgcgccgatgatgtacctggcgctgtcctacgaccaccgcatcatcgacggcaaggactcggtgcagttcctggtggacatcaagaaccagctggaaaacccgggccgcatgctgttcggcctgtaagacacctcccgcccctccgcgcctgcgcggaggggttctggtaatgcatcaaggaataattcaatggctgaacaattcgacgtcgtcgtcatcggtgccggcccggccggttaccacgctgccatccgcgcggcccagctgggcctgaagaccgcctgcatcgatgcagcgctgggcaaggacggcaagccggccctcggcggcacctgcctgcgcgtgggctgcatcccgtccaaggcgctgctggattcctcgcgccagttctggaacatgggccacatctttggcgaccacggcatcagcttcaaggatgccaagatcgacgtcgaggcgatggttggccgcaaggacaagatcgtcaagcagttcaccggcggcatcggcatgctgttcaaggccaacaaggtcgccgcctactacggcttcggtgaactgcagccgggcaacgtggtcaaggtcacccagcatgacggttccatcgtcgagctgaagggcaccaacgtcatcatcgcggccggttcggattcgatcgaactgccgttcgccaagttcgacggcgagaccatcgtcgacaacgttggcggcctggacttcaccgaagtgccgaaccgcctggccgtgatcggcgctggcgtgatcggcttggaactgggcagcgtgtggaagcgcctgggcgctgaagtcaccatcctggaagccatgccggagttcctggcggctgccgatgcggaagtggccaaggcggctgccaaggaattcaagaagcagggcctggacatcaagctcaatgccaaggtctccaagaccgagatcaccggcaagggcaagaagaaggaagtcatcgtcacctacaccgacgcggaaggcgaaaagaccctgaccgtggacaagctgctggtggccgttgggcgtcgcgccgccaccaagggcctgctggccgaaggcaccggcgtcaagatcaacgagcgcggccagatcgaagtcgatgcgcactgccacaccggcgtcaacggtgtgtgggcagtcggcgactgcgtgcgcggcccgatgctggcgcacaagggcttcgaggaaggcatcgcggtggctgagctgatcgccggcctgccgggccacgtcaacttcgacaccatcccgtgggtcatctacaccgaaccggaactggcctgggtcggcaagaccgaagcgcagctgaaggccgaaggcattccgtacaaggccggcagcttcccgttcgccgccaacggccgtgccgtggcgatgatcgagccggcaggcttcgtgaagatcctggcccatgccgaaaccgatcgcatcctcggcatgcacctggtcggcgccaacgtctccgagctggtgcacgaaggcgtgctgaccatggagttcagcggttcggccgatgacctggcccgcatctgccacgcccacccgtcgctgtcggaagtggtccacgacgcggcgatggcggtcagcaagcgcgccatccacaaggcgaactgatcggcatcatggtaggtgccgaccgttggtcggcactcacctgcagacgaaaaaccccgcttcggcggggttttttgttgcccgtttccctgtagcgccgagcccacgctcggctgccctgcaaaggccgccgagcatgggcccggcgctacacctttccagccggcttcttcggtggatcctcacagaccctgtgctgtaccaccgtatcgccggccttccattgcttgaccacccggcagcgcgcctcggctttcggcgcagggaccgccgctgcattggcttcgtcagccgcagcgctctgctcgcgctccagccacgccgacgggggtaccgggggtgcggccagcaccgggcctggcaacaggaccagaccggccagcagcaccctcgtcatgcgggaaccgcccggccgccaagcaaccgcgccggcagcatgaacagcgcgcgcaggaaggcgaacaacgccgagaaggtgatgccgaccaggcggaacggcaggctcagcagccacacgaacggccacgcgatcagggcgaggatcgccagcggccagcacagcacgaacagcaggcaccacacaccgagcgcgaacagggtcttcatcacggtctccttggggcggcaccctgccgcctgcggacaccttggcgccccgccctcgccgccggcaaacggtttgcgacgaaacccgggctgggggcgatgaaatccggtgcagctcctgtagagcccagcccacgctcggctgcgcttcgttgcgatcacagaagacccgcgctgcgcgcgacagccgagcgtgggctcggctctacaggagctgcaccgcgcccgggcggccatggaccacctggaatcgcgccgcggtacgcactgcggcatccgggcgcagcacgctgtcggcgaagcggagctcggcgtccacggtctgccggttcagctgcagcttccaccagccgcggcggtcgccgtcgaaatagcggatatgcgggttctgcggaatcgatggcccgtagtacggcccgtacggcgtgtcgtcgccgccactgctgatcgccggggcgatgaattcggtggccacgaccggcgcgctggccgcgtcgaaatccagcttcaggtcgttgacgaaggtggaatgccagtcgccgcccagcacgatggcattgccctgcccgcctgcctgcatcgcctgcagcagacgcctgcgtgcggcgggatagccatcccaggcgtcgttccagaagcgctcgcgtggcgtgccgccgtccagccgcagctgcgacataagcagctgctgcaccaccacgttccagcgcgtgccctgcgcgacggccatcgattgcgtgaaccacgcttcctgccccgtgccgagcatgctcatgcgcggatccagcgccgcttcgcagcgcggtgactcgcccacaccgcagggattggccgggcggaactggcggcaatcgagcagggtcagctgtgccagatcgccgtaacgcaggcgccggtgcacgcgcaggccgccattgcccgcaggcgtgctgcgcatcggcaggtgttcgtagaacgcgcggtaggccgccgcgcggcgaacgatgaagtcctcgatcgacacgctgggcttctccggatggatgcccgaatagtcgttctgcacctcgtgatcgtcccagatcaccgcgaaggcgtgtgcggcatgggccgcctgcagatccgggtcgagcttgtacagcgcgtactggtcacggtagcgctccaggctcaccgtctcgccactgaaacgcgccgcgtccagcatggtgccacgcacgttctgcagcgggctgtattcatacaggtagtcgccggcatgcagcacgaggtcgacatcgctccgtgcgacatcgcgcagcaccggatagtagccactgttccaggcctggcaggtgcacagggccagccgcagctgctgcagctgcgtgtccggtagcgacgcggtgcggaagtggccgaccgcgctttcctcatcgccatcgcaggcgaagcggtagtagtagtcgcggcccgggcgcaggccattgacctccacgtgcaccgaatgggccagctccggcaccgcggctgcagtaccccgctgtaccagccggcgcatgccggcgtcttcggccacgaaccagcgcaccggcaccgcccgcgacggcatgccgccgccgttgagcgggtccggcgccagccgcgtccacaacacggccccctgtggatccggatcaccggcggcgacaccaagggtgaacggatcacgccccagccgcggccgtgggccggccgtggccagccccggcatcgccgccagcgcgatcgccgcccccgtgccctgccacgccatgcgcagcaggcgacgacggcgttccggatccacaggcccgcgcatcagaagcgcacggtggcggtggccatcacctggcgcggcgcgccgacctgcatggtcgccaggctgcgggtcgggtcggcggcgtaggtgccgttggtgttgatcgaagacaggtagcgcttgtcggtcaggttggtcaggttcagcgccatggtcaggttctgcgccgggcccagcgcgccgaagtcataggccacggaggcattgaccagccagtagctcggcaccgactcgtcgttggtataggtcacgtagcgcttgccgacatggttggccgacaggcgcatgtcccaggggcccggggtccaggccagggtgctggcgaacatccattcgggggtgtcgacggtcttcttgccgcgggtcggcaccacgccattgttcacgtagtcgttgtcgtaggtgctgtcattccaggacagcgcgttggaccaggccaggtcctgcatcggcttcagctgcagtgtcgcctcggcgccgcggctggtcaccgaaccgacgttggagaacagcgccgggcagccgaggatgcccacgcactgggcgatcgccagcaggcggttgtcgaacttgacgtcgtacaccgcaaccgaggcttcatagcccttcccgtagccgcgccagcccagttccagggtgcgtgactgttccggcttcaggtcctgcgcgctggcatcgaacgccgcctgcggcacgttgaacgggctgcccacgcccaacgcgtaggcggcgatgttcctggcgaacgaaccgaagatctcgttgccttcgttgagcttgaagttgaaacccgcctgaggcagcaggcccttcttcgaagtcaggctgctgttgttggcatagctgcccagtggcgtgcgcacgcgggtgcgggtgtgcggcgacttcgcaccgatgtcgatggtcagccggtcatcgaacaggcggaagcggtcctgcacgtagaactggcgggtaatggtggtgtagcgctggtgccacacgcgctggtccgggttgcgcaggaagaagtcgtcggtgaccgggccgtcgatgtagtagaagttgcgctgcacgctgtggccgttgtcctcgtaccagaggccggcttccaggtcgtggccgccgacgttccaggtgaacgccgaggtcacgccggtacggtcgatcgcgtactcggtggtgcggatcgagatcggaatctcgcgaccggtgcccgggttggacggattggacgggctgaaccagtggccctggccacggttgctgtggttgtagacgttgaccttcagccgcatcgactcgttcaggccgaaatcgccggcgatgctggacaggtcatcgttgcgcaggccgtggccggagtagtacgcatcccaggggctgttgacgccgcccgtgaacctgccgcgcgcggcggcgacggcacgatcccagtccggcgcgtagttgtcccagtcccagccaaggcgatcgatcatctccagcgacaggtcctggtagtccgcctcgacgcggcgcgaggcgttgaacagcgcggtgatcctgctgtccgttgcgaaattgtaggtggccttgccgttgaactgtttcagctcctgcgagcccttgcccttccacttgtcgccttcggagtacacgccggacagataggccgcaaagccctggtgctcaccggtctccaggcgcgcatagctgcgccgcgcgctgtcgctgccgaagccctgcgccagcaccacgccgtactcggtggacggatcgatcgaatagaactggaacacgccaccgaggttgctggtggacggcgtacccagcgcgccgatgccggtggacacttcggctccgcccaggttctcgctgatcacggcacggctgatgtgcaggccgttgctgttgccataggccatgttgcccagcgggatgccatcgagcgtgtagcccaggcggctctggttgaagccacgcaggctgatggtggtggaccattcgtaggcgccggtggcatcggccgactcgaagtgaacgcccggcttgctggccagcagcttcagtgggttcgcaccgggcggcaggatcttcatgtcctcggcggtcacgcgctgcacctggcgggcttcaccgcggccgatcaccgagatcgaatcgagggtggtcgccgacggtgcgtcgggggcgggggcggtttcagcggcagcgagcgacggcagcgaagcacagaccagcagggccagcagattgcggcgaagcggagcgtgggacgacatggaggcggattccttgggcacgctggacgccgaagggcggcgtcgaagagcagcagcggcggaatcgtagaagcggcgcgttacatgtcatttacacgccacatgcggaatccttgcgttccgaatggtttaccgtccggaaggcgattgccggccagcggccggcatggccgttattcgaacgagccgaccgaatcgtgggccaggttgtcgaagcgggtgtactcgccgaagaacttcagcttgcacgagccggtcgggccaccacggtgcttgccgatgatgatctcggccaggcccttgtccggcgagttttccttgttgtagtagtcgtcgcggtagatgaacacgatcatgtccgcgtcctgctcgattgcgcccgactcgcgaaggtcggccatcaccgggcgcttgtcggtacgcgtttccagcgagcggttgagctgtgacagcgcgatcaccggcacattcaattccttggccaggcccttcaacgaacgcgagatctccgagatttcggtcgcgcggttttcgctgttgccgggcacgctcatcagctgcaggtagtcgatcacgatcaggccgaggtcatgctcgcgcttgaggcggcggcacttggagcgcagcacttccggcgacacgcccggcgtatcgtcgatgaagatcttggtttccttcagcatcttgatcgcgctggtgacgcggctccagtcctcgtcttccagctggccggtacgcaggcgctgcgcgttgatgcggccattggaggaaatcaggcgcatcgccagctgcgatgccgacatttccatcgagaacaccgccacgcccttcttcgacttgatcgccgcgtactcggcgatgttcagcgcgaaggtggtcttgcccatggccgggcgcgccgcgaggatgatcagatcggtcggctgcaggccggcggtcatcgcatcgaaatcggtgtacccggtcggcaggccggtgatgttgccgccgttctcgaagcggttgcgcagctcctcgaatgcatccttcagcgcaccgggcatggccacgaaatcggtgcgaccacgtgcgccctgttcggcaatggcgaacacgctcttttccgccgaggccagcagctcgctgctgtcgcggccttcgggctggaaaccgtcgttgacgatgtcggtgcccacctggatcagctggcgcaacactgccttgtcacgcacgatctcggcgtaggccacgatgttggcagccgacggcgtggtactggccagttcgatcaggtaggcgccgtcgcccaccagttccatcttgccctgcgactcgaaccactcgcccagggtcaccgcatcgaacggacgctcgcgctcggagagctcgcggatcgcccgatagatcatctggtggtcgcgacggtagaagtcgccttcggtcagctggtcattgacccggtcatacgcttcgggcgccagcatcagcccccccagcaccgcctgctcggcttccaccgaatgcggcggtacccgcaactggtcgatgcgcgactcgtcgcgatcgcgatcgaagccatcaccgcgctctctgcggttggaacggaagccgggacgagcggacatgctgcggtgtttcctgcaaaagtgggccagacgagtgtaggcatgcgccgaccccggcgaccatggacaagcctgtggataagccgtggagaaacgggggatatccgccggcgcctggccagactggcgtgggggcgtcgcactgcctgcgacaggcgccattgcggcacccgagcggagcattatcgcagatcaggcgccacgggtcggagcccgtcgctgcgcgtcaggatccgaccccggggcgtggttggggtcggatccctctgcgacgcagggaactccgaccccgcaggcgtcaatcgcccttgacgtgcaccgcgatcagcgccaggaaccggtccacgtagccctgcaggaacttctgcgtgccctcgttgtggatcgtgccgtcggcatcgatcaggccctccttgaagtggatgaacgcctcgggctgcccaagcacatgcatgtccaggaaggccagggtgttgcgcaggtgctgctgggccacggcggtaccgatctggccgatggaggcgccgatcaccgccgccggcttgccggcaaacgcactgtcaccgtagggacgcgagccgatatcgatggcgttcttgagcacgcccggcaccgaccggttgtattcgggggtgacgaacagcaccgcgtcggcggcgcgcacctggtccttcagccgggtaccctgcgccgggtactgcgcgtcgaagtcctggtcatacaacggcaggtcgccgatctgcacgtactggaagcgtgcgcgatcaccggcgatcttctccagcgcatgggccagcttgcggttgcacgagtccttgcgcaggctgccgacgaacacggcgatggtggggacggacatcgggacatactcctcatggtgcgggaggcccagcctagtcgccgggcccgtgcaggccggtgaagatcagccgcccacaatgcctgcgcgcacctgccgccaatgcgcctgccaggcctggaacatcagcacgttccacagatgggtatgccacttgcgctgccctcccaggaactgctgccacagcggctgcaccgccgccgccgacagcactccctcacgctccagccgcgccggctgcagcaggtcctcggcccagggccgcaggtcgcctttcagccagtcactgaccggcgcgccgaaaccgcgcttgggacggtgcaccatcgaatgcggcacgtaacggcccagcacgcgcttgagcagcaccttgctggtggtctcgctgcgcttgaagcccagcggcagcgaccaggcgaactcggccacccgccagtccagcagcggtgcgcgcgcctccaggctgaccgccatcgaggtgcggtcgaccttgcacaacagatcgtccggcaggtaggtcacgaaatcggccagcatcatcgcgtcggccggcgtacccgcgccgtgcagcggatcggccaggtcgtagaagctgccggcggcccgcgcgccggtcaccgccgcggccgggtcgcgccagcgcgagatgcggttgcggtagacgtcgccgatgccacgcgcaccggtctcggccagcagcgcggccaggccgccggtgcgcgaggcttcgccctgccgctgcgcacgcgcgcccatccagcgccgcagcggccccggcacgcggccgagcatctgccagttgcgcagcgcgcgtacataccgggtatagccgaagaacagctcatcgccaccgtcaccagacagcgccacggtcacgccctgccgcgccagccgggcgaccagcgcggtcggcacctgcgacgcgtcggcaaaaggctcatcgaacatcgccggcaactgcggcaccaccgccagcgcgtcggcgccgctgacgtacaactcggtatggtcacagcccaggtgggccgccagctcccgggccagcggcgcctcgtcatgtcccgaatcggtgaagccgatgctgaagctgtgcaccggctgcccgctctgggcctgcatcagcgacgccaccagtgaggaatcggtgccaccggacaggaatacgccgaccggcacgtcggccaccatgcgtagcgccaccgcgtcgcgcagcagcgtgtccagctgttcctcggcgtcctcgatgcggccctggaagggtgcggccagcgccgcctgcatgcgcgcgcgcgcatcccagtacggccgctgtgcctgttccggacgatgcgcggatgcgccggcagcgacggccgccgcgtccaggcgcaacacccggcccggcatcagcttgtagcagcgctggtggatgctgtgcggcgccgggatgtaatccagccgcagcagcaaggtgagcgcatcgcggtcgatgtcgttgtcgaacgccgggtgctgccagagcgccttcagttccgaaccgaacaccagcgtgtcgccggcccagccgtaatacagcggcttcttgccgacgcggtcgcgggccagccacaggcagcgctcctggcggtcccacagcgcgatggcgaacatgccgttgcagcgctgcagggtgtcttccacgccccattgcaggatcgccgccagcagtacttcggtatcggaatggccgcggaaggcatgccccagcggctccagttcctcgcgcagggcggcgaagttgtagacctcgccgttgtaggccatcacgtagcggccgtcggccgaggccatcggctggtggcccagcggggacaggtcgaggatgctcaggcggcgatgcgccagcgcgatgcccgcctcggcatcgacccagctgccgccatcatcgggcccgcggtggtgcagcgcctggcccatggacagggcctgcgcctgcagcgcctcggccgacgccagcggcgccggcaacaacattcccgccaatccacacatgcatcagggttcctgcgccaggtcgagggtggcgccaatcaccgcattgtcgcttggaagcccgaacattgctgcccccgccagtggcgtgtaggtgtcggcaccgcagacccggcgcaacggcagatggccgaacccggcctcgaccagcgcggtgaccacgccctcgcccaccccgccgctgtggcggccttcatccagcaccagcacccgccgtgcgctggcggcctgggcagcgatgaaaccggcgtccagcggtaccagccagcgcaggtcgaccacccgcacctgccagcccagctgctgctcgatcgcccgcgatgcgcgcaatgccatcggcacgccgttgccataggtatagatcaccaggtcgccggcctccggcgcatagacccggccctcccccggcaccagcgactggccctgtgcggggaagtcgaacagccactggccatcgccggcttcgtgcaggtccttgctcatgtacaacgcgatcggctccaggaacaccgccacgcgcccatccacccgcgccagtgcggccagcgtgcgcagcatcatcaccgcatcgtcgccacgcgacgggcagcccaccaccagccccgggatgtcgcgcaacgcggtgatcgagttgtcgttgtggaagtggccaccgaagcccttctggtaccccagcccggccacccgcaccagcatcgggttgcggtactggtcgttggagaagaactgcagcgaacacgcttcgccgcgcacctggtcgatggcgttgtgcagataggccaggtactggatctccggaatcggcagcatgcccaggttggccaggccctgagccatgcccaggatcatggtctcgtccagcagggtgttgaacacccggcgtgggccgaagcggcgcagcagatccttggtgacggtgtagacaccgcccttctgtgcgacgtcctcaccgaacagcaggctctgcggatacttcgccagcagttcctgcagggcatggttgatctggatcgcgaggtggcgtggcgcctgccgttcgggcaacgcctccgcaccgccatacagcgcttcacgcgttccggcgggcacctcgcgccgtgcttcggcctgcaccgcagccggcgtatagggcgcaagcggctccatcacttcccgcagcgactgcagcttcggccgtccttcggcatcggcggcggcggccatgcagcgcgcgcgcatcgtctcgtaggccacctcgatggcggccgcatccatccagcccgattccatcgcgatctgtgccgagcgcagcagcggatcctgcgcctcggccgcgcacagctcgggcaacgcgcgccattccatctcgaagtcggtgccggcgtgccccatcaggcgcgtggtgcgcagatgcaggaaggtcggccgccgcgtacgccggcagtgctccaccgccgcctgcacctgcgcatggccggtggccaggtcgaggccatcggcgtagaaatagtccagcccgggctgaccgctgaagcgttcggcgatccagccttcaggcgttttcaccgagatgcccaggccattgtcctcgcagacgaacaggaccggtgccggcagcttctggtaggccgaccacatcgcggtgttgaacgcggtctgcgcggtggcatggttggccgaggcgtcgccgaacgagcacagtacgatgctgtcggccggaatgggcagttcgtggcccagccgcttgccgctttcgagggccagcgcggtgcccagcgctttcggaagatgcgaggcgatggtcgaggtctgcggcagcacccacaacggtttgctgccccacaccttgtgccgccccccgctggccgggtcatcggcgctggcagcaaaggacagcgcggcatcgcgcagcgggtcgatccccggcacctggcgtgagcgctcggccatgaaggcaccggagcgatagtgcaggaatgctggatccgtatgccggcaggcccgcgccagcagcgcattgccttcgtggccggatgaaccgatggtgtagaagaccttgttctgcacgcgcagcacgcgcgccatcaggtccagctggcggctggccagctgcgaatcgaacagctcgccaaacgcggcggcggtaagcgtgctgcccggcaggatcggcgcatccggcgccgggcgcgggcgcgggatgccgcgccagccacgcaccgcgtcgaggaaattggcgtcgcacacgtcggcgcggttgagcacgcgcatgcgtgcgggaatcggatctggaaccacagcgaacatcgaacaccctccgtgtcgttgttgcattccgcccggcgttggccaggcgctaccctgtggggatcaccttggtgagagtcatgcggcctcgaagcgggcgcgcacctcggcggtcaccgccggcatcggcaggaagcgcggctgcccgcgcacgcgctgcaaccaggcgcgaacttccgggaacggctgcaggctgattccaccctcgcctgcgacgtcggtataggcgaacagcgcgatgtcggcgatgccgtacccactgccggtgaaccattgcgcatcacgcaggtgctgctccatcaccgccagtgcagtggcggcgcgctcgtgcaggcgtggcagttcggcgcggcgcggcgacccaggcggggtccagccgcggatgaagcgcgcgaccgctacgcacggctcgtgcgtgtactgctcgaagaacatccagctcagtgcctgcgcgcgctcccagccatcgttgggcaggtagggcgtgccttcggccagccagaaaaggatcgcattggactcggtcagcacgcggccatcgtcgcggacgatcaacggcaccttggcattgggattgagcgcgaggaactcgggggtgtgggtctggccgtgggcactgtccacttccacccagcggtagcggctgccgagctgctccagcagcaggcggaccttgtggcagttgcctgacaccgacatgccgtgcaccgtcaacgggacgcgctcttccaccattgcctgctccctcggatccggccggcggccggctgcgtgcagtctggcaagcacgccactgaatgccaagcgcgggtgcagcatgactacacggtagtgccggccgctggccggcaacctcgatgcagctggtagtgccggccgctggccggcatcctcgatgcagctggatccaagcgattgccggccagcggccggcactaccaagccacgctcagcgcgcgcgttgccgccactgttcgcgcgactggccccagatctgcatgggcttgccgttgtatggcgccggcaactcccccatgcgcagcagggtgctgccgagcttgcgtgccacggcccgcgagttgtcgttgtcctcggcgatggtatggatcacctcagcccagcccagcgtatcgaacgcccagtcgatcgccgcgaccgccgcctccggcgcatagccccggccccagctggcatggcggatgccccaaccaacctcggtacccggccagtcctgcggctgccacggtcccatccgcccgatccagtcgccgctggatttctcgatcacgctgaacatcgagaagccgaacagctgccaggcgccggccaggctgcagaaaccgcgccaggccaccgagggtggctgcacgccgcccagggtacgcatcgtggcctcgtcggcgcagaacgccaggtacggctcgtagtcctcgcgaagcagcgggcgcaggatcagccgctcggtttcgatgcgcaggtcgaagatgctcatgccggctccatgtcgaagggagcacccatgatggaggatggcttccctgcgcggatgaatatcgccggtcgcaatgaaacgggccggcatgagccggcccgtcaggtactgcatgctgcgccgggattactggcgcgtggctgcggcagtggcaccggcggcagcggtctgcgtgaccagctggccatcgaccaccggcaggcgatcgctggccggcttgttgtccatgcgcacggtcttctccgcgccgtcatagcggtaggtcacgttgtaacccttcaccacgtcgttggtacccatggcaatgcggttgcccggcttgctggccatgcgcatggtgccggtggtgccatcctcattgcggtaggtcacgttgtagccggtgacgcggctcgactcggaggtggcggtctcggtgtggcactggcgctcggtgcggttgaccacacggccacccacatggcgcttgtcgatctggttgccgatgaagccgccggccacggcaccggcggcggtcgcggccttcttgccgttgccgccaccgacctggttgccgagcaggccaccgaccacagcgccgaccacggtgccgccgacgttgccatcgcgttccggcaggcgttcctgcaccgtcacgtcctggcagacttcacgaggagtctgggtcgtggacgtttcgcgcaccgcatcggtgccgatcacggtggcgtaggccttctgcttctcggtgatcgggtcaaccttcagcacatcggcatattcaagcccgcgcggcgcggacgggtccagcttgtcaccacgtgcgccgtcgtcagaagcgttaccttcaacgaggcgcgattcaccattgggggttccggcgctgatggaatcgggcgacttgtcaccactcttcatgaaggcggcggtggcgatgccaccgaccagcagcgcgcccgctgcgaccaggacagttgtagttgtgcttttcatgacctgctccttgcggaccatccgcaacgttctcggggcagattgcagcatgcgctgcctgaacggaatctccacatttcctgctcattccgataacccattcagcatcgggaaatgctgggcccgtggtagcgtttgcatattccccacgaggcttcccgccatggccaacccgatgctgctgccggtactgcaatgggcccgccggctgcgctaccccaccctgttcaagctcaccgccggcctgttcgtgctgaccttgttcatcccggacccgatcccgttcgtcgatgagctggtgctgggcttcggcacgctgctgctggccaactggaagagccgcaacgccgcaacacctccgccgctggaacagcgttgagcatcctggttgacagccactgccatctggatgccagcgggttcgaccgtgaccgcgctgcggtgatcgagcgtgcgcaggccgcgggggtgcgccagcaggtggtaccggcggtgaccgcggccagctggccgaagctgcgtgaggtctgccagcaggcgccggggctgtacccggcctacggcctgcatccgatgttcctggccgatcaccagcccgggcacctgccactgatgcgcgagtggatcgagcgcgaacgcccctgtgcgatcggcgaatgcggcctggacttctttgtcgaagggctggacgccgacgcccagcaggcgtatttcatcggccagctggaactggcccgcgaattcgagttgccggtgatcgtgcacgcgcgacgcgcggtggatgcggtgatcgccgccatccgccgcgtcggcggcctgcgcggcgtggtgcacagcttttccggcagcccggaacaggccgcgcaactgcacaggcagggcttcctgctcggcctcggtggcccactgacctacgatcgcgcgcaacggctgcagcggctggtgcgcgagatgccgctggaacagttgctgctggaaaccgacgcgcccgaccagcccgacgccggcatccgcggccagcgcaacgagccagcgcggctggcgaccattgcccggcacgtggccgcactgcgcgggatggagctggaagccgtggcccaggccacgacggagaatgcgcggcgattgttcgcgctgccggcaatgtaacgggtaggtgccggccgctggccggcacgatccatcacaccgcgctggcctcgaccgcatccaccttcaccttcttcggctccagcagcatctccagcgccttgccaaccgccgcgaaggcgaacgcgccggtgatgtgggttgccgcgcccaggccggcaccacagtccagcttcaacgccgcatcggcgcccaggttcggacggatgccgcagacgctgccatcggcctgcgggtacttcacattctccagcgaatacaccgccggtacgccgaaatagcgcttggcgttcttcgggaagttgaattcgctgcgcagcttcttgcggatcagcgccagcatggcgtcgtgctcggtgcgagagagatcgcggatgcgcaccagggtcggatcggtacggccaccggcggcaccgacggtcagcaacggcagcttgcggcggcggcaccatgcgatcgtctcgaccttgacccggaagctgtcgcaggcatcgatcaccagatcgaacccccggtccagcagctcggccatgttggacacggtcaggaatgcctgcaccgcgtcgaccccgatgtccggattgatcgcacggcaacgctcggccatcgcctcggccttgttgcggccgtagttgccttccatcgccggcagctgccggttggtgttggacacgcagatatcgtcggcatcgatcagggtcaggtggccgacggccgaacgggccagcgcctccaccacccacgagccgacgccgcccatgccgaccaccgccacgcggctgccctgcaggcgctcgagtgcacccacgccgtacagccgttcgatgccggcgaagcgttgtttgacctgttcgttcatcgggctattttaacgtgcaggtgctggcgcccgcagtacgccggcgtcgaacccaccgttgcacgcccggagtgcccgcatgaatgccagcccgccccgccgcctgtccagcgcccatcgctacctgttcgtgctctgcctgggcctgctgatcggcctgatcgccacggtaatggtcggccgcgccctgcaggcgcgtcgcgatccgttcccgggcagcctgatgcaggtgatgcagcggcagtcacagctgctgcagcaggcccagctgcagaaccgctgcagcctggctgacagcgtgccacggctgcaggtgctgcgcctgctgtccaatgacctggaccaggcgtttcccgggctgaaggacagtgcgcagttccagcagcacgccagccagctgcgcggcaacctcaacacggcgctggcctcaccccccggcgactgcagggccctcgcccagctggtggaaacactgcaggcggactgccgcgcctgccaccaggatttccgctgagccgcattcatcctgcagccgggcagcacgcacacggttggcgcgttgttcacgttcgaaaggagaggattcgtccaccctgctgcacgacgcagcaccacccaacccacccgccttcacggccaggagacgccccatgaagatccagctcatcgccgccagcgccatcgctaccctcgcgctggctggctgtgccacctcgcccggttacagcggcggtggttacaacaacggctacaacaacggcggctacggcaacaatggcggctacaaccagggccgttgcgctgactgtggcatcgtcacccgcatcaacaccgtgccctcgggccgcaccgcgcccagcgcgaccggcgcgatcctcggcggcatcgtcggcgccgtggccggccatgaaatctccgaccacaccggtggcagccgtggcaacaagaacatcgccgccgccgcaggcgcggtcggtggtgccctggccggcaaccagatccagaagaacgtcaccagcgatacctatgacatcagcgtgcgcatggatgatggccgcaccatcgtggtcaaccagcgcgatctcggcggcatccgcgagaacacctacgtgcgcgtcgtcaatggcaaggtcatcctgcgctgacctgcaccgggccaacggcaaagaaaaaggcccgcttgcgcgggcctttttcatgccgacgggcggcgggtattacaccggctgcaccttgtcagcctgcaggcccttctggccctgcacgacttcgaagctcacagtctggccttccttgaggctcttgaagccctgggtctcgatggcgcggaagtgcacgaacacgtcctcgccattctgccggctgatgaagccgaagcccttcgcatcattgaaccactttacggtaccggtctcgcgctcagccatctcactaactccctttgactctctcttgttgttggaaacgcccggtgggcggctgacaagcaagggggaagcgaggtgcatcgatgcagcggatcggaaagatcttgcttcatcaggccacgatccacggtgaccttgccaagctcagcgactgcaacttaacccgcccaaaacgaaaaagcaactggcaaaatctttcactgtcaaccccaaaacggccaccatacgggacagcatgggactctcattcatcttatatctgctagcggtcatttttgtcctgatcggcatcgccggcatcatcctgccggccctcccgggcatcccgctggtgttcatcgggctgctgctggcggcctgggccgacggcttcgcccacgtcggctggcccaccctggtcgcgctgggcgtgctgaccctgctttcactgttggtggacgtgctcgccaccgtagttggcgcgcagcgcgtcggcgccagccgcaaggccctgtggggcaccttcgtcggcagcatcgtcggcctgttcttcatgcccatcggcctgtttgccggaccgctgctcggcgccctgctcggcgagtactggcacacccgcgaactcggccgctcgaccaaggtgggcctggcgacctggctcggcatcctgctcggcctggcactgaaactggcggtggtgatcgcgatgctgggcctgttcgcgttcgcctggttcttctgagccacctagccttcacgccacgcgcacgccgtggccgtgcataaacggtggggctggccgcgatccggtgcagccgccacactgtgcgattcccgtatccatcgaagggcctgctgcaatgaccctccccacgctgcttccccgtctggcgccgctggcgcttgccctggccagtgcaccgttggctgcgcaggagttcgcgcccagcgccgacacctcgccggccgcctgcgcggcgatcaccaccgacgcggcccgcctggcctgctatgaccgcctcttcgggcataccccggaggccaccgccgccgccgatgccgccgccgaatcggctgcgcaggcgcgccgcgaggaacgacagaccgcgcgcgtgagccagggcgaggaaaagctgcgcgagcgggtcagcgacctgttccgtccggcggcaccggacagcgcgctggccaatgctggccgcggttcgctgctggacagccgctgggagctggccgaggactccaagctggggcccttccagctgcgtgcctacaagccggtgtacctgctgccggcgttctggaccagcgaccgcaacaccacgccgcattcgccgaacccggccaacagcgtgacgaccccgcaggtactcgacagtgccgagctgaagttccagatcagcttcaagaccaagatcgcagagaacctgttcggcgacaacggcgacatctgggctggctacacccagagttcgcgctggcaggcctacaacagcgaggattcgcgcccgttccgcgaaaccaactacgaacccgaagtgatgatggtgttccgcaacggctactcgatcggtggctggcgcgggcgcatgaccggtatcagcctcaaccaccagtccaacggacgggccgatccgctctcgcgcagctggaaccgggtcatgctcaacatcggcctggatcgcgagaactgggcgctggtgctgcgcccgtggtaccgcatcccggaaagccgcagcgaagacaataatccggacatcgaggattacatgggccggggtgacgcgaccctgatctggaaccgcaacgggcatgaggtcgcgctgatggcgcgtcattcgctgcgcaccggcaaccgctcccacggtgcactgcagctggattacggctttccgatcagcaatctgctgcgtggccatgtgcagatcttcgacggctatggcgagagcatgatcgactacaaccacaaggccacctatgtgggcgtgggcgtgtcgctgctggagtggttctgatggacgtgacgatctggcacaacccggcctgcagcaactcgcgcggcgcactgaagctgatccgcgatgcgggcttcgacccggtggtgatcgagtacctgggcaccccacccgacgcggccacgctgcgccaggtgctggccgagtcggccctgagcgcgcgcgacctggtgcgcagcaaggagacccagttcgccgaactcgggctggaagatgccgacgatgccaccctgctggctgcgatggccgaacacccgcgcctgatcaaccgccccgtggtgcgcacgcccaagggcacacggctgtgccgcccgccggaaacggtgctggagatcctgtaacggaaaaggggacggaggggattaagtcgtttgtgcacaaacgacttaatcccctccgtccccttttctggttaccgccagtcggtgatgccttcgcggcggtaggcctcggcgaacgccgggcgcgccttcatcgaggtggcatgtgccttgagcgacggccaggtgtcactgggcctgggcatgttgcgcgaccagcgcatcagcatcaccagcatgtagtcgaccacgcagggcgtggcgcccagcaggtagggcccatgcgccagcaggtgcgtggccacatgctgccaggccgcttccaggcgctgtcgcgccatctcgcgactggcctccacgtttgcctcgcccgccacctcgtgcggatagaaccaggcgcgataggccggctgcaacgtattggcacaccagaacatccagcggtaggcatcggcgcgctgcggcgtgcccagtgccggcaacaaaccggcgtccggatggcggtcggccaggtacagggcgatcgccgccgcttcagtcagtaccaggccatcgatcagcagcgtcggcaccacgccggccggattcagtgccaggtactccgccgacttgtgctcgcgcgcgtcgaaatccagcagcaccaactcgtgctcgatgccgagctcgatcagcagccagtgcaccaccagcgcggcggtgcttgtcgaaccatacagcgtggtgctcatgcggcggatcctgtgcaggtgggccggccgattatgcgcccgtgcgggagccgtcgctcagccgcagctgctcatgcaggtatcgcggcgctcgccacaggacatcatcggcgcgcgcagcgtgcagtcatgcgtcttcagttcgcaggcacggcgcaggtccgggttgtccacgtccttgcagcgcttgtccggcgccggcaccatccgctgctcgcaattgctctggcggctgccgagagagtcattctgcgccatgcagctgcggtagctggcctggcactgcatgcggcattgcgccgatgcagggaaatccgcgccttcgtacgacgccggggtgctgcagccggccagggccagcagcacgccggccacgatgaagcgatgcagggccatggacacgtcctgtgcgagggtgtgccaaccgtagcagagccagggctacaggcgcgttaatcctgcctccagatacagcaacggcgccacacgggcgccgttgtctggaccgaagcgtgcgggaattactccaccaccaccggaatcttgccgatgcgggcctgccactcgcgcgggccggtcttgtgcaccgattcgccggcggagtcgacggccacggtcactggcatgtcctgcacggtgaactcgtagatcgcctccatgcccaggtcagcgaaaccgaccaccttggccgccttgatcgccttggacaccaggtaggccgagccaccgacggccatcaggtaggccgacttgtgcttcttgatcgcctcgatcgcggccgggccgcgctcggccttgccgaccatgcccagcaggccggtctgtgccagcacctgctcggtgaacttgtccatgcgggtcgccgtggtcgggccggccgggcccaccacttcgtcacgcaccggatcgaccgggccgacgtagtagatgaagcggcccttcagatcgaccggcagctgctcgcccttgttgagcatgtcgaccatgcgcttgtgcgcggcgtcgcggccggtgagcagcttgccgttgagcagcagggtctggcccggcttccagctggccacgtcttccggggtgatcgtatccaggtccacccgggtgcccttggatgcgtcgtaggtcagcttcggccagtcttccagcgacggcgggtccagcatcaccgggccgctgccatccagggtgaagtgcgcatggcgggttgccgcgcagttcgggatcatcgccaccggcaggttggccgcgtgggtcgggtagtcgttgatcttgatgtcgagcacggtggtcaggccacccaggccctgcgcaccgatgcccagcgcgttgaccttctcgtacagctccaggcgcagctcctcgatgcggttggacgcaccacgggcctgcagctcggtgatgtcgatcggctccatcagcgcttccttggccagcagcatcgccttctcggcggtgccaccgatgccgatgcccagcatgcccggcgggcaccagccggcgcccatggtcggcacggtcttcagcacccagtcgacaatcgagtcggacggattgagcatggcgaacttggtcttcgcttccgaaccaccgcccttggcggcgacgatcacgtcgactttgttgcccggcaccaccttgacgttgaccacgcccggggtgttgtccctggtgttgatgcgcttgcctgccggatcggccagcaccgaggcgcgcagcttgttgtccgggtgcatgtaggcgcggcgcacgccttcattggccatgtcttccacgcccatggtggcgtcatcccaacgcacgtccatgccgatttccaggaacacggtgacgatgccggtgtcctggcagatcgggcggtggccctcggcgcacatgcgcgaattgatcaggatctgcgccatcgcttccttcgcggccggcgactcctcgcgctcgtaggcggcggcaaggttcttgatgtagtcgaccgggtggtagtacgagatgtactgcagcgcgtcggcgatggactggatgaggtcttcctgcttgatcgatgtcacgtcttgctcgcttgctcgaggctggcgggggtaatccacccattttaccccctcccccggccccggggtggtagtgccggccgctggccggcaagattcccccgacgctctgtcacgccacgcgccactgcggcgtccttgcccacatgaacgccgaaaccgctttccagacccaccgcccgcgcctgatggcgctggcctaccgcctgctcggcagccgcaccgacgccgaagacgtggttcaggacgcctggctgcgctggtccggcgccgatcctgcggccgtccgcgatgccgaggcctggctggtcaccaccaccacccggctcggcctggaccggctgcgtgcggccaagcgcgagcgcgtccactacgtcggcccatggctggccgaaccgctggcggtcaccctggagccggacccggcgcccggtccggcccagctgcatgcgctggccgacgacgtctcggtcgctttcctgaccctgctcgaacagctcggcccggaggaacgcgccgccttcctgctgaaggaggcgttcgaccacgactaccgtgagatcgccgagttgatcggccacagcgaggccaactgccggcagctggtgcaccgtgcccggcaacgcctgcaggccggacgaccgcgcttcaatgccgatgccagccagcaccggcagctgctggcgcgcttcatggaggcctcgcagcgcggcgacagcgacgcgatccaggccctgctgcacgccaacgcggtgctggtttccgacggcggtggcgtggtcactgcggcggtgcggccgctgctgggcgccgaacgcatcggccgcctgttctgggccatcgcccgccgcggcgcggtgcatcccgcccagctgggctacgtcaacggcgagccggcgatcctgcgcttccagggtgagcgcctccattcggtcaccaccatcgaggtggtcgatggccgcatcgccaacgtgtacagcgtgttgaatccggaaaagctgccgggtgttgtcacgcgcgatgacggtacggcgtcctggtagtgaaaggcggccaccgtggccgccgtggagccgaaaatgtccgaccacgcctctccccgcgtcccctacacccgcctggccgccgaggccttcaagggcctgctggccaccagccaagccgtgcatgacagctcgatcgatccgaccctgatggaactggtgttcctgcgcgtgtcgcagctcaacggctgcggctactgcatggacatgcacggcaccgcgctgcgcaagggcggcatcgagccgcgcaagctggacaccctgcccgcctggcacgaaagccgcttcttcgatgcacgcgagcgcgcggcactgggctgggccgaggcgctgacccggctgaccgacggcgcgccgtcgcaggccgcgttcgatgccctggcaccgcacttcgatgagaagggcatcagtgacctgagcataggcatcgcggtgatcaatgcctggaaccgcctcggtgcggggttgctgccgccgctgccggcctgacccaccccgccttcgacagttcatcggtgctgctggtaggtgtcgaccttggtcggcacggtagatccacgctacgcgtggatacgggagggtcggatcccttcgcttcgcgaagggctctgacccgctgtggtcgctggggtcagagccctttgccgcgcaaagggatctgaccccggtgccggcaacacagctgcactgactccccctgcacgtatcacgcgcgcacaatacgcgcatgcctgccatccccaccgctggcgctgccgccgcgaagaaacccagcctgcgccagcgcttcaaggcgatgcgcaacctgccgccgttcctgcgcatggtctggcagaccagccccgcgctcaccctggccagcctggggctgcgcctgatccgtgcgctgctgccggtggcgatgctgtacgtcggcaagctgatcatcgacagcgccctgcacctgagccagcacgacgccggtttcccgccgctgggcgaggcgctgtccagcggcatgctcaatccgctgctgggcctgctggcgctggaattcggcctggccatcgcctcggacctgctcggccggctggtcagctatgccgacgcgctgctgtcggaactgttcgccaacgtcaccagcatccggctgatggaacacgcggcgacgctggatctggaggacttcgaggacccggacctgcaggacaagctggaccgcgcgaggcgccagaccatgggccggatgaacctgatgagccagctgttcggccaggtgcaggacgcgatcaccgtggccagcctcgccgtcggcctgctggtctacgcgccgtggctgatcctgctgcttgcgctggcactggtgccggccttcatcggcgaatcgcacttcaacgcggccggttacagcctcaacttccaatggacgcccgagcgccgccagctcgactacctgcgccagctcggtgccagcgtggaaacggccaaggaagtgaagatctacaacctgcaccgcttcctggtcgagcgctatcggcgcctgtcggtggcgctgttccaggccaaccgtgccctggcacggcgccgggcgttctggggcgcgctgctggctgcgctgggtacgctgggctactacaccgcctacgcctacatcgcctggcgcacggtgcgcggcgatttctcgatcggcgacctgaccttccttgccggcagcttcctgcgcctgcgccagctgctggaaggcctgctgatcggcttctcgcaggtggccagccaggcgctgtacctggacgacctgttctcgttcttccagatcgagccggaaatccactcgcgcgaaggcgccatacgcgtgccgcagccgatccgccagggcttcgtgttcgagaacgtcggcttccgctatcccgatgccgaacagtgggcggtgcgccacctcgatttccagctgcaggccggcgaagtgctggccctggtcggcgagaacggcgccggcaagaccaccctggtgaagctgctggcacgcctgtacgaaccggacgagggccgcatcctgctcgatggccgcgacctgcgcgactacgacctggacgacctgcgcgccaacctcggggtgatcttccaggacttcgtgcgctacaacctcagcgccggcgagaacatcggcgtcggccaggtcgaggccatggacgaccgggcgcgcatcgccgacgccgcgcgccgcggcatggccgaggaagtgatcgaggagctgcccggtggctacgaccagctgatcggccgccgtttcaagcagggcgtggacctgtccggtggccagtggcagaagatcgccattgcccgcgcatggatgcgcaatgcgcaggtgatgatcctggatgagccaacggcagcactggatgcgcgcagtgagttcgaggtgttccagcggttcagggaactggcggataatcgcaccgccgtattgatttcccaccgtttttcctcggtccgcatggccgatcgcatcctggtgctggccgatggccggatcgaggccagtggcacccacgcccagctgatggcacagggcggccgctatgccgagctgttcgagctgcaggcggcgggttaccgctgagaacgcctctcgttccgcccaatgagaacccgtctcatttgagatagaattcccccgacgacttttgatagatacgcccatgtcctccgcttttggcgccgaaacggtgcttgaggtccgtcactggaccgacgcctacttcagtttcaccaccacccgcgacagcggcttccgcttcgagaacggccagttcgtgatgatcggcctggaaaccgaggcacggccgctgctgcgtgcgtactccatcgccagcgccaactgggaagagcatctggagttcttcagcatcaaggtgcaggacggcccgctgacctcgcgcctgcagcacatcaagccgggcgacaaggtgctggtcggcaagaagcccaccggcaccctgctgatcagcgacctgcacccgggcaagaacctgtacctgctgggcacgggtaccggcatggcgccgtggctgtcggtcatcaaggacccggagacctacgagcgcttcgagaaggtgatcctctgccacggcgtgcgctacgaaaaggatctggcctaccgcgattacttcgagagggagctgcgtgaacacgagttcctgggcgagatgatcggcgacaagttgctgtactacccggccgtcacccgcgagccgttcgccaaccagggccgcctgacctcgctgatggaaagcggccagatgcagcgcaccctcggcctgccggagctgagcccggaaaacgaccgcgcgatgatctgcggcagcccgcagatgctggccgacctgcgtgctgtgctcgatgcccgcggtttccaggtttcgccgcgcatcggccagccgggccactacgtgttcgagcgcgcgttcgtcgagaaatgatgctgcaacggtagtgccggccgctggccggctcttcctggcccacgggattgccggccagcggccggcacgacctcacagcagcgcttcgatctcgccgcgcagctgctccggccgggtggtgggcgcatgccgcgacaccacccgcccctggcgatcgaccaggaacttgctgaaattccacttgatgcgggcactgccgagcacgccgcgcttctcgcgcgcgagccacctccagagcgggtcggccccctcgccgttgacctcgatcttttccgacagcgggaagctgaccggatagtccagcgaacagaactggcggatctgcgcggcatcaccgggctcctgcgcgccaaactggttgcacgggaagccgatcaccaccaggccgcgctcgcggtagtcctgccacagctgctccagcccggtgtactgcggggtgaagccacagcggctggcgacgttcaccagcagcaacgggtggccctggtaccgggccagcgcctgcggctggccgtcgaggtcgcggaagctgaaatcgtaggcagtggtcatggcagcgggccgtgggcggtgaacgcatggtacccgcgcccggccccggcaacatgccttttgacacaagtgcagtcgccgccggccgggttaccctcgggcccttgtttgccttaccggagcttctaccttgaccactcgacttgcccttgccgtggccatgtccctcggccttgccctgcccgccttctcggccggcgccgccaccccggctgccagcaccaatgcccagcaggccaacccgttcttcgccgaaagcccgctgccgctgcacttcccgcagttcgacaagatcaaggacagcgacttcgccccggccttcgacgccggcatggcgcagcagctgaaggaagtggaggcgatcgccaacaacaaggccaagccgaccttcgacaacaccatcatcgcgctggaaaagagcggtgacatcctcgaccgtgcgaccaccgtgttcttcagcctggtcggcgccgataccaacgacacccgcaagaagctgcaggccgactactcggcgaagtttgccgcgcacagcgatgcgatcgcgctgaacggcaagctgttcgcccgcatccaggcgctgtacgacacccgcagccagctgggcctggacgccgaaggcgtgcgcctggtcgagaagtactacgacaattacgtgcgcgccggcgccaagctgtccgaggccgacaaggccacgctgaaggacatgaatgccgaactggccaatctgggcaccaagttcagccagaacgtgcagtcggaagtgaacgcttcggcaatcactgtcgacgacgtcaaggagctggctggcctgtccaaggagcagatcgccgccgccgccgaagccgccaaggcgcgtggcctggaaggcaagtacgtgatcaccctgctcaacaccaccggccagccgccgctgaccaacctggccaaccgcgccctgcgccagaagatctacgaagcctcgaccacccgcggcagccgcggcggtgagttcgacaacaccgcgctggtctcgcgcatcatgcagctgcgtgccgacaaggccaagctgatgggcttcccgaacttcgccgcctacaacctgaccaaccagaccgccaagacccccgaagcggtcaacgcgatgctcggcaagctggctccggccgcggtggccaatgccaagcgcgaagccgccgacctgcaggcgatgatcgacaaggagcagaaggccgcgcgcaagccgaccttccagctggaaccgtgggactgggccttctacagcgagaaggtgcgccaggccaagtacaacttcgacgagtcgcagctgaagccatacttcgaactgaagaacgtgctggagaacggcgtcttctacgccgccggccaggaattcggcctgaccttcaagcagcgcaccgacctgccggtctaccacgatgacgtcaccgtctacgacgtgttcgacgccgatggcagccagctggcgatcttcatcttcgatccgtatgcacgcgcctccaagcgtggcggtgcgtggatgaactcctacgtctcgcagtccaagctgaccggcttcaagccggtggtcgccaatcacctgaacatcccgaagccgccggccggccagccgaccctgctgacctgggatgaggtgaacaccaccttccacgagttcggccacgccctgcacggcatgttctccaacgtgaagtacccctacttctcgggcacctcggtgccgcgcgacttcgtcgagttcccctcgcaggtcaacgagatgtgggccgacaacccggtcatcctgaagaactacgccaagcactaccagaatggttcggcgatgccgcaggccctgctggacaaggtgattgccgcatcgaagttcaaccagggctttgccaccaccgaatacctgggggcggcgatgctggaccagaactggcaccagatcggcccggaccaggtgccggcggccaaggacgtgatggccttcgagcgcgccgcgctggagaaggacggcatctactacgcgccggttccgccgcgctacaagaccccgtacttcagccacatcatgggcggctactcggccggctactacgcctacatctggtcggaagtgctcgatgccaacacccagaagtggttcaaggacaacggcggcctgagccgcaagaacggcgaccacttccgcgccaccctgctgtccaagggcggcagcgtcgacgcgatgcagctgttccgcgatttcgccggccacgagccgcagatcgaaccgctgctggaaaagcgtggcctgaccggcgccggcaactgatcgccagcgcagtcgcctgaaacgaaaaccgcccgggagaccgggcggttttttgttgtggtcggggtcagagccctcttctgcgaaaagggatctgaccccggggtcggatccctttccgacggaaagggctccgaccccagccacgccatcatcgcggcgccacgtacccacccggcacgccttccggcgacagcaccagctgccacagctgcgcgtgccggcagcggaaggtggccatcgacccggccaggtagaagcgccacatgcggcggaagtgctcgtcatagcgcgcatccagccgtggccacgccgcctctacgttgcgccgccaggcctgcagggtcaggtcgtagtcggtgccgaagttgtgccagtcttccagtacgaagcggccttcgaacgccttggtgatctgcaccgccgacggcagcatcgagttggggaagatgtagcgtgcaatccatggatcggtgcgatgccgtgagacgttggtgccgatggtatgcaacagcagcaggccacgtggcgacaggcagcgcttggccacttcgaagaaaccggcgtagttcttgtcaccgacgtgctcgaacatgccgatcgagaagatcgcatcgaacggttcgtccagttcacggtaatcctgcaggcggatctcgatcggcaggccagcgcacaactgccgcgcgaactcggcctgctcctgcgatatggtcacgccgacgccgctgacaccgtagcgctcggcggcgaacttcagggcttcgccccaaccgcagccaatgtccagcacgcgctggcccgggcgcaggcccagcttgcggcagacaaggtcgagcttggcctcctgtgcggcgtcgaggtcgtcggcgtcgcgccaatagccacagctgtagaccaggcgctggccgagcatggcctggtagagatcattgccgaggtcgtaatggcggcgaccgacttcgtaactgccctgccccgcctgcaggttgaacaggcgcgccttcagcgcgtctgccacttcgcgccagccgtgcacccgttcatccaggtgcgcctgcatcaggtggacgaggaattcatccaggacattggcatcccaccacccctccatgtagctctcgcccaggccgagcgagccgtggcccatgacccgcgcgaaaaagcgcgggtcatgcacctggatgtcctgtggctgggtgccgccgatgcggaccccggcttcgtggagcaggccggcgacccgctcctgcaaccctgtatccacgccacctcctcgactgcggtcaaccgcgtgcgaacagctccacgtagtccttggccacgtgcggcaacagcaccgctgccggtacatcggcggtctgggtgccgtccgagtatggaccgacctggtacggcgggaaaacaaagcgcagcgcggtgatctgccccttgtcgtcggtcagtggctggaactggctgaaattgtcggcctgcgggccggttccgtcggcgatcatgcgcgatgcgttgcgcagcgattcctgcagctgggccgggtccatgtcctcgccactgaggcgggtggccacgcgttcgcgcaactggtcggcgacgaaatcgctgatcgccttccagcccttggcatcggccacaagcttttcggcgctgagcatctgctgctgctgcggcagccacacgaaccgcgccaccagcggttcgccgtgggcgccacccgtgtagcggctgccgtcggcactgaccaccaccagctgcggggtttcaagcagcttctcgaagctcagcgacagctcgtagggcatggtcggcttgtcgttgcccagcccgtccagcgcctgctgcaggtcgctgcgcgcactcgtggcatagctctgcagcgcgcgggccaggcccggataacggtcgataccggccgggtagctgatgcccaccacttcgcgctcgttgttctcgatcacgtcgcgcagatccagcggcgcttccgtggccggcgtttcgcccgcggccgtcgcctcggcggcgggcgccgcgtcggtcgccggtgccggctcgctttcacgctggcaaccggccagcaacagcacgcccaccacgccggccaacacgctgccgcgcagtggccggttgtttccaatcttcatcgggatcccctgttcatgtttgtacatcatcgcctgccatggctgaagcgtgacccgctggcgttcagccaacgagcaggtcgtggtactcctcgtggcgctgcaggaaggcctcggcgtaggaacatgccggcaccaccttgtatttctgctcgcgggcgaaacgcagtgccacgcgggtcagctcaccggcgatgccacggccggcgatcggctcgggcacctcggtatgggtgatgaccatgcgcctgcgcttgatctggtaatcgagcaccgccagctgtccgcgcacacgtgcggtgaagcggtggttggccaggtcgtgctcgacctcataggccagaccggggggcgtgaccgaagccatggaactgtctcctgcggcgactgcgtggatggtgcgcagccgggcgccatgatcgcgtgaagcctgaacaggggcaagtccagtccattcacgtcagttttcgccctcaagctggaggcgggccggccgctatcgcctatggaggggtacggccaggctggcacgacccttgcgaccgttgaccatgcgcaccaccgtggaggctcccatgcacgccagcaattcccattccgataccgaccgcgccctgctggagggcctgctgcaactggcggtggaagggcagaccgaggatcaggatttccagcgcatcggcgaggaagtgttcgcccgcctgctggatacctacggccagcagaccgcagcctgacccggccggggcggatcggacccgatccgccccgctacccgcatcagccgccgccgaggcggaaggtcgggttggagagttcgcgcaggaagtgggtgaagatgctcggctgcatggccagcatgaagatcacgccaaacgccgcacctgccaggtgcgcgctgtggttgatgcggtcgccaccgcgcctgtccatccagatgctgtagccgacgtagaacgcggcatagatgatcgccggtgccgggatgaagaacaccaggatgatcgaccacggcttgatcaggatgaaggcgaacagcaccgccgataccgccccggacgccccgaggctgaggtagttcgggttcttctggttcttcaggtagctgggcaggatcgagaccagcagcgcgccgatgtagaacgccgggtaggtcaggtagctgccggtcagctgcaccatcacgctctcgatgaatcccccgaagaagaacagggtgatcatgttgaagatcaggtgcgaccagtcggcgtggatgaagccataggtcaccagccggtcgtactggcggtgacggtcgatggccggcggccacaggatcaggcggtcggccagcttgcggttgttgaacgccatccacgacaggatggcggtgatggcgatcaacagcagattgacgggggtcatgtcaggctcaggcgctacggtagttgtcgaccatacgatagcgtttcgcgtaccaaccgaaggccaacgccgcgacgaaggcgaagccggcgaagaagaacatcaggaacgccgcctcgctcaggcccgtgcccgcgatctggtgggtgaccgtgtcgttgcgcaccgctgcgttggacagcagcacccacaggttgccgatggtggtggtcaggttccagaagctcatcaccacgcccttcatcgcctgcggtgcctggctgtaggcgaactccaggccggtggccgagaccagcacctcaccgaaggtcagcagcgcgtacggcagcatctgccagaagatcgacatggcgttgccgccgtccatcaccacctggatgccacccaccacgatccaggccaggccactgaaggcgatgccggcggtcatgcggcgcagcgcggtcggttcgaagccgaagcggcgcagggccggatacagcaccaggttgttgaacggaatcaggatcatcaccagcagcgggttcagcgcctgcatctgcgaggcggtgaaccagcttggcatctgcatctgctggccctgcaggacccaggtcgaggccttctggtcgaacagcgagaagaacggcgtggtcagcgcgaagatcaccagcacgcgcagtaccgagcgcacgccttccacggcttcggccggatgctggccacgggcgcggtccagctgcagccaggtgccgccaccgatgccggcaaggatggccaccagcgccaggcacaggcagatcacgatgcccagcgaaccgaccaggccgaacgaggccaccgccagcgccaggccaagcacggcgatcaccaggcccggacggccctggccagccacgcgcgtggtcagcgcggtacgcaccacgttggcgaacgaatgcgggtccttcggcggcagcggcaccagcacgtagcgcctgcggcccagccagaacacgaaggtagcgatgaacatcaggatgcccgggatgccgaacgcccactgcgggccccagttcttcagcaccagcgggatcagcagcgaggcgaacagcgagccgaagttgatgatccagtagaaggcgtcgaagacgatcttggccaggtgcttgttgctctggtcgaactggtcgcccatgaacgaggccaccagcggcttgatgccgccggcaccgagcgcgatcaggcccaggccgaggaagaagccctcgcggctgttctcgaacagcgccaggcacaggtggccggcgcagtagaccaggctgaaccagagaatggtgtggtacttgccgaagaacctgtcggccagccagccaccgagcagcgggaagaaatacacgccgatcatgaagctgtgcatgatgtccttggcttcaccggcacggccttcggcagtgatttcctgcagcagcagcgaggtgatcaggaactgcaccaggatgttgcgcatcccgtagaaactgaaccgctcgcaggcctcattgccgatgatgtacggaatctggcgcggcatctttccctggccggcgatgggggcgactgcgtcgtggctcatcctgtaaggcattcctgcaaagcgaaaggcgcaaggttaccggaaccggggcttgcgaagcacgctgcagggctgcatgacaacggtgccaatccatggcaggcagtgcaggccctgccggaagtcacggcacctgcacgacaaaagcgtaaacttatcgttatgcgccccctcgcccacgcccgcctcctgctcagctgccttgcgctgttgctggcgttgcaggcgcaggcacgaccacaggcgccggccgccgttgccagcgagagcgaccccaggcagctgacggtcgccgcgctggagctgcccagccgcgatgacgcgcaatggaagcagcgccgcgagcaggtcgcacagctgctgaccgagctgcagccggacgtgatctcggtgcaacaggtgctgcagcagcagggccgcaacccggcctgctggctggccagccggctgcgctacagctgcgacttcgttaccgccgatccgcccagccagccgctgcggcatggcaacgccatgctgacccggctgccggtcagcgaggacggcgtgaccctgctgcatcctcccggcaccttcagcgcggccggcatgatgcggctgaggctgggcgaggcgctggtcaacatctatgtggcgcggctgcgcccggacccggacgaggccagcgcccgccagcaccagaccagcgacctgatgacctggatcggcgccaccgccgaaggcatgccgagcctgattgccggcgatttctcggccagcacggtggaactggtgcgcagcacgccggggttccagccggcccggcgcaatcccggcggccgtgccgaggcgccggcggccagtgggggcggcagcagcggccacggcctggatgtgctgttccaggtcaagcatttcgacggcatccgccagcagccgatcctgctgccggccgacggcgacctgcccggcctgcgtctgggtgtgatggcgaccctgcgcctgcagggcgatacggccactgcggaataggtagtgccggccgctggccggctcccccggtactgcacggttgccggcctgcggccggcactatcgaacgactgctgcaacagaaaaggccggggtctcccccggccttctcatgtcatcccgtcacgcgatcaggcgatcgcttcctggtaacggcgctcgacttcgttccagtcgatgacgttgaagaacgcgccgatgtattccgggcggcggttctggtacttcaggtagtacgcgtgttcccacacgtccaggccgaggatgggggtgttgccttccatcagcgggctgtcctggttgccggtgctctcgaccacgaccttcttgtccggggtcacgctcagccacgcccagccactgccgaaacgggtcagcgcggccttggtgaaggcatccttgaacttgtcgaaaccgcccaggtccttgtcgatggccttggccacgtcgcccaccgggttgccgccggcattgggggccatcacggtccagaacagcgagtggttggcatggccaccaccgttgttgcgcaccgggccctgcaggttctccggcagcgacttgagcttcttcaccagctcttcgaccggcaggtcagcgtactcggtgccttccagcgccgcgttgacgttgttgatgtaggtctggtgatgcttggtgtgatggatttccatcgtcgccgcatcgatatgcggttccagcgcgtcgtaggcgtaggacagcttgggcagggtgtaggccatgatgcatctcctgattgcgagggcacccgacgatgtcgggcggtgcgcggtgaatgatggggacagaccgccagattaccaagagggatgtaaaggaaattgcgtcctgccagtgagcacgacggcaattgttacgcagcagtgacgcagcgcgctcctcatgcaccgtgcagcgcacaggcgctacagtgcgtgtactaccctcgcccgcccctgcccatgcgcaacccccggctgctgatcaccgccatcgccctgctgctgctcggcctggtcgccaaccatttcctgcaaaggccgccagcgccgcagttcgcgcccgacctgcagggcacgcctgtcgcgcgcgcgccggccaccgcctcgcccggcaaggacagcggacttcccgcgttcctgcccgccgaagcgcgcgcgaccatcgccctgatccagcgtggcggtccattcccgcaccgccaggacggcagtaccttcggcaaccgcgagcagcagctgccgcagcgcgcgcgcggctactaccgcgaatacaccgtcgacacccctggcgcgcgtacgcgtggcacgcgtcgcatcgtcaccggcggcgatccgccggaagcgtggtactacaccgacgaccattacgcgtcattccgcagcttcaccgtaccggcccagggagcgcagtgatgagccacgatgatttcggccttggcctgcatgacatcaacaacgccggcgtctacgccatcgacagcgacgacatcggcgcactggccgcggcgatgcgcgatgccggcctgaaagtgatccgcatcgatctggagggcgtcgcggacaagcgcaccctgctcgcccgtttggccgcacagctggatttcccggccggtttcggcggcaactgggatgcgctgtcggacaacctgcgcgacctgcaatggctgccggccaatggctacgcgctgttcctggccgacgtggacgcgctgcgcgccggtccgcagaaggacttcgacaccctgctggacgtgatggacgagaccagccgtgactgggtcggccgcgacgtaccgttctgggtgttcctgtcgcagagcgcgtaaggtcactgccttggccgggatgcactgacgccttggcagaggccgaccttggtcggcgcttctgtgccaaccaaggttggcatctaccaaagcgcgggccggccagcacgtgggcacggcccctgtctagcggctcccgttgtcttcctgcagttccttcttgaacgggatgtccggcggcggtcgtgccacggccggctggtcctgcatgttggggttggtcaggccacagccgccaccggcctgcaggatcgaaatgacgcaggagatccttgtgttggtgcccggcagtggaatctccatcgccttgacgcccttgcgcacccattcggccagcagcgattcctgcggcacccagtatttgtcgaacgaggtcggcgtgtagtcgtacggcgggcgcttcagccaggtgccggactgcgcaatgcgctccttgctccagccgtcgttggcaccgccgggcgcaccgcgcgcggcatggccatcgccctcctggccaggcacgcgcacgctgccatcggcattgaacaggccgctgcccttgccggcggtactggcctggcgggtaccgttgctgctgccgtcgcggttgcggctggaagacccccagtcatcgcccttggcaggcgtcgcccagttgcctggatcaggcgccgggcgcgctcccgcgtttgcgggtgtgctgctggatgctgacggacgcgcgctgctgctcgcctgcgtcgcgctgccctgggccgcagtcgcgggcgtcgccgtggcactgccactggaggatgccggcgctgccaccggtgccgaggccacttcacgttcccgcacctgcacgtcgcggccagtgggcgcgcgtacggcgggctcacgcccggccaccgccgccatccgcacctgcggatcggccacggcctgaacttcacgttcgcgcacctgcacgtcctgctgcggcacgcgcacctgcacttccgggctgcgcagcagttggggagcgaccggcgcgtcgaccgtactgacttcgcgttcgcgcacctggatgtcacgcacctgcggcgtgcgcacggccagttccggggtacgcaccgggcttggtgtcggcggcgcctgcaccggctgcacgctgcgctcgcgcacggcgggggtgctgtcacgcggcacgacgctgacttcggtgcgcggcacactgaccggcggcaccacgaaatccgtgctggcctgcgccacttcggtggcctggacgggcgaaggcggcggcgcggccaccggcgccggctcggcgtcggccggcggtggtggtggtggaacgctggcggtcggcgcggatgccggggatgaggcggtggtttcggcagcgaccggacgtggcgcaggggccgaggcagcgcccgcctcctggcccggcgcaacccgacctgccgccgcagccgcagccgcttcggcgcccggctgatcgccaccgccttcctgcgacgcgcgaccgacgaactccacctgcacgcgctcgccctcggtgccctcttcgtccggcgcgctggtacggatcaccgccacccacagcaacagcacgaagaacagcagatgcagcagtgcactgaccagtgccgaggtccagcgcatccagcgctggtcgcgcggcgcggcgtcccagtcctgccagaacaatcggcgcagcgcctgccacggcgacagccgcggcgactggcctggcgggcccggcagcgggcgcggcaggaaaactgcgatcacctcgcgggcatggaacggccgcggcagtggccccagcgagcgcagccacagcgcccagccatagggcaggcgcgtggacttctcgaggacggcgcggggctgctggcgcgccagcagcagatcaatgagttgctcggcccgggtcagaggcacgcgtcagcgatcaggcgacgttgccgcgcggaatgtaaggcgcgtggccgctgtcatgatcggtcgcgtcacgcacggcggtcacgcccggcacgcggcccatcagggttttttcgatgccctgcttgagcgtcacatcggccatgccgcagccctggcagccaccaccgaagcgcagcagcaccacgccgtcggacgagacttcctgcacggccaccttgccgccatgcgaggccagctgcggattgacttcgttctccaccacccagtgcacgcgttcgaccagcgaggccgcatcacccggcgcttcgcccttgatgcgcggcgccttgatggtcaactgctgggcaccggcggtgccggcgacgatgtcgatctcggcgccatcgagccagccaacgctgccggcgtcgacatagagggtgaaaccatcgcagtccaccgcccactcgtcaccgagcaggtcggtcggttcggcgaattccagccgggcatcggcgcgcggcgtaccggggtcgaccgcgctcaggcgcacgcccatgccgggcacgccctcgcgttcgatcaacttgcggaaatgggtctgggcagtgtcggagatctggatcatcaggctattctagccaagtaagcgtcagccgctcattcggtttatacaccgtccggcgcattgttcagtcaacacgaggtggagattcccatggccgacctgattccactggcccaggcccgttgcgtgccgcgcaaaggcagcgaccacaagctcggcgaggcccgcctggccgaactgctgccgcaggttcccggctgggagctgagcgagggtgaccaggccctgtcgcgtaccttccgcttcaaggattactacgccaccatggccttcgtgaacgcgctggcctggatcgcccaccgcgaggaccaccacccggacctgggcgtgcactacgaccgcgcggtcgtgcgcttctccacccacgatgtgggcgggctgagcgagaacgacttcatctgcgcggccaagacttcggccctgacggagcaactgccatgaacgtacgtttgctgagcctgtccctgatcgctgcgaccggcctggccggctgtggcgcgtccgaaccgccgtcaccgccaccgccgccgccgaccgaagtggccgcggtgaagacgccgccgccgcagtacccgctggaactggcctgcatgggcgtgggtggcaccagcaccttcaaggtgaccatcggcaccgacggcaagccgagcgaggttgcgctgttgaccggggccggcaacccgcagctggacgaactggccaagaccgccgtgcagggctggcagttcaaggccgccacccgtaacggccaaccggtgccggccaccatccaggttcctgtcagcttcaacccgccacagccgaagccggaccagtgcttcgccatcgaagaacgcctgcgccgcggcggctgatcgcgcgcaccccacgggcctgccgacgcccgcctcgccctcgccgccccggccccgcccggggcggctgtctgttgaccaggatcgcgtgggttgatgctgcagattccccctgaaaacatctggatcgcactggcggtcacgcttgccgcaggcctggccaccgcgatcggcagcctgctggtgctgttctcgcgccgccccagcccgcgcctgctggcgttcggcctggcctttgccggtggcgcgatggtctatgtgtcgctgtcggagatcctcaacaagtccattgcatcgtttgcactggcgtatggcgagcgcaccggcttcacctacggcaccctggccttcctgctgggcgtgatcgtgatcgtactgatcgaccacttcattcccaatccgcatgacagcctggacaaacaggaccctgcgttccgcgagaacagccgcgagtacctgaagcgggtcgcgctgctgacctcggttgcgatcaccgcacacaatttcccggaagggctggcgaccttctttgccacgctggaaagcccatcggtgggcatgccactggccttcgccatcgccatccacaacattcccgagggcatcgcgatcgcggtgccggtgtacttcgccacccagaacaagttctacgcgttcagtgccagcctgctgtccggcctggccgagcccgtgggcgcggcgcttggctactggctgctgtcaggatcgctgtcgcacgccacgttcggctgggtgttcggcctgatcgccggcgtgatggtgttcctggcgctggatgagctgctgccggcggccaagcgctatgccaagggccacgagacggtttatggactggtggccggcatgggcacgctggcgatcagcctggtgctgttcaagtggtgaggggttcccggctcgccctgtagagtccagccatgctcgactggctttccgcgcggcccgaccgaggcgcagtcgagcgtgactcgacgctacaggagatccttacttcagccggtccagcgcctcgaccagctcatccgccagcggcgcgttcaatacgtatgggctcttgccgtcatccagcgcgaactccagcgaggccgcatgcaggaacaggcgcttcagcccgatctgctcacgaagccgcttgttgaccgctggatcgccgtatttgtcgtcaccggccaccggatgccccagatgctgggcgtgcacgcggatctggtgggtacggccggtctcgatccggacttcgcagtacgaatggccaccgcggcgttccagcacccggaagtggctgatcgattccttgccgatcgcattgacctgcacatggcgctcgccgccctggcgcaggcccacgtgcagcggtgcgtcgaccgtcatcacgccgtcgggcatgcgcccggccagcagggtcaggtagcgcttgcggatgccggcgccgtggtcctcacgcagcaaggcctgcagttcgctcagcgccgagcgcttcttggccacgatcagcaggcccgaggtgtcgcgatccaaccggtggaccagctccagggtctgccccgggcgcagcgcgcgcagggtctcgatggcgccgaagctgatgccgctgccgccgtggctggccacgccggtcggcttgttcagggccagcaggcgggcgtcctcgaagacgatggcctgctccaggcggcgcatgaacgcctccggcggaccggccttgtctccttcctcagtgagacggaccggcggcacgcgcacctcgtcaccggcctcgagcttgcgttcggccttggcgcggccaccgttcacccgtacctggccactgcgcaccagcttgtagaccaggctgcgcggggcgcccttcagctggccgagcaggaagttgtccaggcgctggccggcgcggtcggcgggaacggtgatcatgcgcacggaaggcttgtcgccagcgggtttggtggggtcttggacggtcatcaggctgtttattctgttacactcggggggcgagataagggattgatttcgttggaagttactcagggccagaagcccagcttccgacgaatccggcacagtgcgcgaccaccgcccgcggggcggccatgttagcggctcaccggccttcccggccatcgccggatgcctgacacgcaaccgtgctgaacatgtcccgcgtggcgctccagcctggctgacagctgcctgcggcctgtaacaccccaaaacccataagagtgaagcgctcctgcggcctgccgtggtgtcgtagcgctggaaacccaagccgccctccccgcgcttgcgcgaatgggcggcgaaccgtgtccagaggcgaaaccccatggcgttccgcgcggtagccgcttgcgaggaacgcaacaatgaagcgaatgctgatcaacgccacgcaggctgaagagctgcgtgttgccatcgtggatggccagtcgttgtatgacatcgacatcgaacagccgtcgaaggaacagaagaagtccaacatctacaagggccggatcttccgcatcgagccctcgctggaagccgccttcgtcgagtacggcggtggccgccatggcttcctgccgctgaaggaaatctcccgcgactacttccaggccggtgtcgaccacaacaaggccggcatccgcgagctgctgaaggaaggccaggagatcgtcgtccaggtcgacaaggaagagcgtggcaacaagggcgccgccctgaccacgttcatctcgctggccggccgctacatggtgctgatgccgaactcgcccagcgccggcggcgtttcccgtcgcatcgagggcgaagaccgggccgcgctgaaggacgccctggacaagctgaacattcccgacgacatgggcgtgatcatccgtaccgccggcgtcggccgcgatgcggaagagctgcagtgggacctggactacctgctcaatgtctggcgcgccatcgccgaagccgcactgagcaagccggctccgttcctgatctaccaggaatcgcgcctgatcgtgcgcgccctgcgtgactacctgcgcgccgacatcggcgagatcctggtggacaccgaggagatgtacgagcacgcccgcgagttcatgcagcaggtgatgccgcagaccctgcgcaagctcaagcattacaaggacgacatcccgctgttcaaccgcttccagatcgagtcgcagatcgagggcgcctacgagcgcaacgtgcgcctgccgtcgggcggctcgatcgtggtcgaccagaccgaagcgctgaccgcggtcgacgtcaattcctcgcgcgccaccaagggcagcgacatcgaggacaccgcgttccagaccaacctggaagcggccgaggaagtggcccgccagctgcgcctgcgcgacctgggcggcctggtggtgatcgacttcatcgacatggcctccaacaagcaccagcgcgaggtcgagaaccgcctggccaacgcgctgaagtacgaccgtgcgcgcgtccaggttggccgcatctcgcgcttcggcctgctggaaatgagccgccagcgcctgcgcccgagcctgggtgaatccagccagatcgtctgcccgcgttgcgacggccacggccgcatgcgcagcgtcgagtcgctgtcgctgtcgatcatccgcgttgccgaagagcatgcgatgaaggaaaacaccgggcaggtgctggtccaggcgccggtggagatcgccaattacctgctgaacgaaaagcgcagtgccctgcgcgagatcgagcagcgccacgaggcgccgatcgtgatcgtcgccgacgagcagctgcacaccccgcactacaccgtcacccgcctgcgcgagaacgagagcaacaagcccagttaccagcgcggcaccccgcgcaagctgccggtgcatgccctgaccaagggccagctgaacatcccgccgccggcggtgacccaggtcaagcacacctcccccgccccggtgcgcgaggaagtggagccggccgcagcggcaccggccccggtcgtggcagcgccggttgcagcggccccgagcggcggcgtgatcggttggctcaagcgcgtgttcggtggcgaaccggcgccggcaccggcaccggcggctcctgttgcccgccagcagcaggacggcggccgcaaggaccgcaacaaggatcgcaacaaggaccgcaaggatcgccgcgacgacaaccgtggcaacggcaacgctcagcagcagaaggatggcggcaaccgcaaggagcgcggtgagcagcgcaaggacggtcgcaacggcaacaacggcaatgcccagcagcagccgcagcagggcaggcagaaggagcctcagcagaaggacggccagcagccgcatcagcagaacaagccgcgcaacgagcagcagggccagaaccagaaccagaaccagcagcagccgaagctgaagcagcccaagcagccgcgccagccgcaggacggtgacaagccggccgagaagccgcagcgcagcaccgccgaggcaccggccgaggccgtgaccgcggctgccgccgtggccgccacggcggtcgccgccaatggggtgaccgctcaggaagccactgcgccggtggcgccggttgcgccggccgcctccgctccggcggaagccactgcaccggccgacaccactgccaacgccggcaacgaggccgaggcgattgccgtgaccggtgaagaggctgctgtcgacgccaacggcgagcaggccggtgaaggcgcgacccgccgccgccgtggccgtcgtggtggccgtcgccgccgtcgtggtggcgccgagaacgctgccggcagcgatggcctgggcgatgatcaggacgacgcggacgacagtgatgacaccgatgccgctgatgtcgccgagcagagcaacgacagcggtgccgggaccactccagtcgcggctgcgcagccggcccgtccgcaaccggaattcgatttcgatgacgaagtcgaaccgaccgctgccgaatccggaaagccggtccgtgccgccgccgctgttgtcgccgcgccggtcgcggtggtgagcagcaccgtggtcgatgccgctgcaccggtggtggccgaggtacaggccccgatcgataccgtggccaaggccgaaccggcatcttcgccggtgcagaccagcatgctcgatgccatcgacgcggcgaccccggcccagccggtggtggctgcagcaccggcggtcgaagccaagccggtcgtggttgaggctgccccggccgttgaagccactccggtggtcgaagtgaagccggtcgtggtcgaggctgctccggtcgtggaatcgaagccggaggttgttgcagcgtccccggtggctgaagccgagccgctggccgttgaggccgccccggtggtggaggccgctcccgcggttgaagccaagccggttgtcgagaccgcaccggtcgccgaacagccagtcgctccggtggcagttgaagccgcaccggtggaagctgcggccccggtcgccgatgcggtggtgacgccgtcgatcgatccggtcgccgatggtcacaccgatgccgccgcccaggcggccgaagccaaggccgacgaagaagacgaagacgccgccaagcgcacaccgccggcgaactgatcgcgatctggtcgcgtgaaaaggaacggcggggatcgatgatccccgccgtttctgtttgtgcgccgggcgcgtgcagcgctctggtagaggccaaccttggttggcgccgttgttcgagcgaacgcggacacgtccgtgccaaccaaggttggcacctaccaggacatcagcgcgtcggcgcgaactgcaaccgggtccacacgccgtagtggtccgaggcccagcgaccgctgtcatcgggctggtcgaacaggagcttcgcttcgcgcgcgaccatccggtcctgctggaagaagatgtggtcgatacgcgaaggtgcctggtaatagtgccggttcaaggtgctgaccccggccaggtcggtgttgacgtgcacgctgccatagctgtcgccgtaatggctgcgcagctcgctcaggtcacctgcgtccaccagcgcattgaagtcgcccgcgatcaccaccggcgcgccggccgaggtagcggtgatgaagcgcagcaggtcctcgacctgggtacggcggatgcgctgaccactctcgtcgttgcgctcgttgagatgcgtggcgtagacgttcaccggcgtgccgtcgacgtcgatgcgcaggtgggccaccgtgcggtagtcgtccaatggcagcagcagatggtccccctgggcgaggatcggccgccgggtcagcaacgcattgccgtaacgcttcggcgcacccaccggatcggtggacacgaatacgtacttgtagccgagttggctggccagccactgcgcctggttgcgcacgttgcggcgctggatcacctcctgcagcgcgatggcatcgggctgcaggcgcttgagttcggccaggatggtacggcggcggcttggccagtcttcgcggtcatgatggaggttgaaggtgaccatgctcatgcctggcgcgctggcgatgtccaccgctggcgatgcgacctgcggcaccgccgccagcgtcagccctggcaatgccaatgcaatggccagccccagggcgcgcaccgtcgcacgcgctccctccccttgttgcttcatcgttactgccccttgcgctcggcgcggcgcaccgcgcccggtacatcgatctcgacccgtgccggcagctggtgcacgtgcagttccttgttgatccattcggccgcttcgccgttgatggtcgcctcgcccggatcaccggcgtacggccacggcaacaccacgccaccgaccggtggcaccaggcccggctgcacctccagcaccagctgcttgtcgctgcgctgcaggcggtaattgagctggccctgcggcgtgcgaaggccctgcacggcgatgccctcgccctgcagccaggccgtcgggatgccggcggccaacaccagcgcatcgtccatgtcacgactgtaggcgaacatgtccagggccgagcgcacgaagtccgaggcgacccaggcatgcggcaggtcaccgacgaagaacggcttgcgcggcgtgcgcgagaccacttcggcccactggttccaggcctgcggcgcacggtccttgaagaagaactcggtcgcctgccaggcgcgatcgcgccagcccaggcgaacgaaggcggccacgttgcgccattcgtacggcgtgtagtccttccactcgcgcttgccatcgcggcgggccacgaattccttccagtagcgctcgaaggtcgcctccaacgcctgctgcggcagccggccctgctcgccgcccggcgccagcgcgatggtggtcgaggtcgcgtcgaaatcgcccagctcggccgagcccggcaggtagtcgatgttgtgctgctgcatcgccgacagcagtgacgcctgcaggtcatcacggaactggtcacgcgactcggcgatctgcatcgcttcgaccttgcccagctgggccgccagcgatgctgcgtccttgtagccgcgcaacgcccagaaattatcccagtacgaatgcatcggcttggccgaatagccttcgtggctgatcgaggccggcatcatcccgtagaacgccggattgcgcgcacggttctcttcggtacgctcgctggcacgcagctgctccatgtagctgtaggcgccctgcacgtgcggccacatcagctcggcgaaggtgctgtcgccggtatagcgcccatattcggcgatgctgtagatcagctcaccgtggctgtcgttctccggtaccgggtcgctgccgcgcgcatcgacacagcacggcaccttgccgttctcgaactggtaaggcgcataccagttgatgtagtcacgcacggcatcgctgcgccccatgcgcagcaggccttcggaaatcatcgcgccgtcgcggatccagctgcgcgcgtacgagcgcgtgcccggctgcaggcgcgggccgacccgggagatcagcatgtgcgccacggcggtgcgcagggtgtcgaccagggcctggcctgccgccggcacctgcagcgagaccacgcccagcgcgtgccgccactgttcggccacctgcgcctgcgccttggccacgtccagcgcctgcggcgcccagctcccggtctgcggcagcaccactgccacttcgcggctctgcccgggttccagcttgatcgtatacagcagcgcaccggacgccatgccggtactgtccttcactaccgtagtggccggatactttccggacgcaagatgcatcgcatcgagcttgccatcgaacgtgctggcgaaacgggcatcgggcacctgcagtggatagatgcgcggctcgccgttgatgcgtaccagctgttcgcccacgtccagcgcatcgatgcggctgaagccgccgacggtgttgaggaactgggtcggcgggttgacctgccaggggcggatcgccagcgccagggtgtactcgtgcgccaccttgtccggattgctcagccgatagcggccgatcaactgcgcgcgctccggcgtgccctgcacgaagctggtcaccgccaggccggccttctcgtgcacccagtcgacgttggcgatcggaagatagtggtcctgcagcgactgggtagtggccaccttcgaccagtccagcagcttgccgtcgaggcggatgaacggctcgatgctgaagctgcccttggccggctccagcgcaccgtcctcgctgatcagcgcctgttcctggccgccatcgaggccgagcagggtccagtacggctgttcgcccacatacgcacgcggcagcgaaccgcgcggcaggtcggccgccaccgaggacaggaaggcgttcggcgtggcggcgaacgccagcggcttgagcgtgatgtcacggatgccatagcgccagttcgggccatcgagcagatcgaaacgcacgtagcgtgcgtcggtgtccggcagcgccagccagtcgcggccacccgcaccgccggtcacctcgcgcacagtgcgccagtcccggccatcttcggacgtccgcacggtgtaacgattggcttccaggttcggcagccagtcgatcaccgcaccgccgatctcgcggctcttgtgcaggtccaggctgatggtctgctgcttgaccccgccgctgatccagaacgtatcgcccttgccatcgatcatgcggtcctgcagcgcggtggcggtatcggcgatgaccgatggcaccagtgccgaatcatcctgcggtggcaggccctgcagggtcagcttgtcgaagcacaccgtgccgcggccaccgaccttgctgtagatcgtgaactcgaccgcggcgctgcgcgccatctccttctcgggcgacggcccccacgccttgtcgatctggcgacgccggtattcgaccggtgtccacgccttggggaagctgtagcccgggcggttgacccaccagacgttgtcgccgctggcatcgatcagcttgaactgcaggtcgttggccggcgaatcaccacgcagctggaagccgaaacggtagttgaccgggtagtcgatgttcagcgcgcggcggatgccgacgtagccggagaccttgtggaaatcatagtccaggcacagggcacggccgccgccggcgccgctgaccggccgcagcgaaccactgacctggtcggacagcaccagtttccaggcgccgatatcgtcgaagtcgtccagcaccttcggcgccggcagtgccggtggtgcggcgatcgccagggaggtccacaacagtcccagtccaacggcgatcgctcgcttcatcccttgacgctccccagcaacagaccttggatgtagtaccgctgcagcaccaggaacagcgccagcaccggaaccacggtgaccaccgcgccagccatcatcatttccacgtccatgatgtgttcgcgcgagagggtggccagcgccaccggcaaagtgtagtgctcctggtcggtcaacacgatcagcggccacatgaaatcgttccatgcgcccatgaaggtgaagatcgccagggtcaccagcaccggcttgagcatcggcagcacgatctggaagaagatgcgcagctcccctgccccgtcgatgcgcgccgcttccagcagttcgtccgggatcgaacgtgcgtactggcgtaccaggaagatgccgaacacgctggccagcgccggcacgatcacgccgccgaagctgttgaccagccccagctgcttcatcagcaggaacagtggcagcatcgccacctgcgctggaatcaccagcgccgccatcagtacctggaacaggcgctcgcggccgacgaagttgagcttggcgaaagcgtaaccggccatggtgttgagcagcagcgagccgatcgtgatgcccagcgacaccagcaggctgttggcaaagttgccgcccatgccggtgcgcgcgaacagttcatggtagttgtgcgtggtgatgctcgaaggcagcagcggcggcgggaaatggctggcctcgccctgcggcatgaacgagaccgagaccatccacagcagcggtgccaggctgaccagggccagcaccagcaacgcaccattgatcatccacgggtaccagcgcgactggccgatttcacgactcataccaactgcctcttgcggccgaaacgcagcatcacggtggtcaccgccaggatgatcaggaacagcaggaacgccacggcggaggcgcgtcccaggttccaccacttgaagccttcctcgaacatgaaatacagcacgctgacggtgctctgcagtgggtcgccgcgggtcatcacgtagggttcggcgaacagctggaagtagccggacacggtaatcaccccgaccaccagcagcaccgggccgagcatcggcagggtgatgtgcaggaactgcttccagcgcgaggcaccatcgatgcgcgccgcttcgtacaggtcatgcgggatcgcctgcaggccggccaggaagatcaccatgttgtagccgaagttcttccacaccgcgaacagcatgatggtcggcatcgcccagttgggatcacccagccagtcgatcgggctgatgcccagatggcccaggccgtagttcaccaggccatagctggtatggaacaggtagcgccagatcaccgccaccgccaccagcgtggtcaccaccggcgcgaacagggccgtgcggaacagggccttgaagcgcgcggccggtgcattgagcagcatcgccgcgcccagcgacacgccgatcgacaacggcacgccgatcagcacgaagtaggtggtgttccacagcgacttccagaacagcggcgtctgcagcaggtcgatgtagttgcccaggccgacgaagcgcaggttgctgctgtcggccagtgcatagaggtcgaagtcggtcacgctcagtgcaagcgccgaggcgaccggcaggccgaagaacacgcccagcacgatcagcgaggggccggcgaagatccagccggccagcgaagtacgtttcattgcgcgctcccggcggccacggcgctgctcgattgcggcgacggcgcgcgctcctgcaggcgttgttgttcatgcatccagcggcgcttggccagcaccttgtccacgcgctggtccagctcttccacggccttgtcctgcggcaggccaccgcgcaccaccttctcggtgacgatgcgcatttcctgcacgatgcgctcccattcgagcaccttcggcgtcggcctgacccgctccagttgatcgcggaacgcggccgccagcgggtcattggccagcgacggcgtgttccacgcactgcggcgcggcggcaggtcgccaatgatcgaatggaagcgtgcctggatttccggccgcgacaggaattcgatcagcttccaggacgcctccttctgctgcgacttgcggaagatcaccaggctggtaccaccggcgatgcccgcgcccggaccgtccggccccggcagcgcggcggtgccccactgcccttccagttccttcggctgcagcttcttgaactcgcggatgttccaggggccggagatgtagaacacgttgaagccgcggaagaattcgtcccagacattggagatctgcgtctcggacatcttcggcgcccagccctgctcgaacatgttggcgtagaagcccagcgtgcggcggaaccccgggctggagaaattgccccgggtgtcgtcgtcacgcagcagcgggtcgggctgctgcaaggccagcgacagctgctgctcgaactcgttgatcggcatcagcaccgcgtagcggctcgggccctgcatgcgcttgatcgccgccatctgctcttcccattcctgccacgtacgcggcgggtggtcgtagccggccttggccagcaggtccttgcggtagtagatcaggcgcgtatcgacgtaccacggcacgccgaccagcccgccgtggatcacgttggtatcccagatgccctggaagtagtccttcgggtcgaccacggtggagcgctgcacgaacggctgcagcggggtcagcgcgtcgagttcggcgaactccggcacccaggtgttgccaagctggcacacgtccggcaggccgtcggcggcgaacgcggtcagcagcttctcatgcgcggcggtccacgggatgttctgcacatccaccttgatgccggggttttcggcctcgaattcgtggatcagctcgctgaccacctcggcttcgcggcccatcgcccagaagcgcacggtggtggtgcccggttcggtacgggcgcagccggccacggccaacgcggccagggcaggcagcgcccagcggcgcaggcggtcgatccagttcggcatcgggctacttgccctggcctgtggtgcggttggcattgttcttctgttcctgcgcggcagccgcgcgtgattcggcgatacccaccgcgcgtgctgccgcggccttttcgtctttctgcagttccagcggctggaacgacccttccggcgccagccagccgccactgaacccggcccgctccaggcccttgcggatgtacgggttcttcttcatcacttcccagacgaagtcatcgcggtagttggcgatcatggtcaggatcgggccctggtcgatggcgatgtagtcgctggcgacccagccgcgatcgggaaccagacgaccggtcttgatcgggatgtcgtagttgaagctggggttgaacgaatccaggaagccgtagctggaatagatgtagtcgccaaagcgcttgtgcatctccagcgtggccgggatcacctgctcgggggcgaacaccaccgaggcgatcgcagcggtcggggcgatggtgccgtcatcaaagttctcgcgcaggccggcgccgcgcgaggagtagtggcggaactggcgctgctcgccgcggtactcctgcgtggtgttctgcggaccatcgctggcggtcaggccccacacgttctcgccatactccttccactgcatcgggttggcgatggcatattcgcgctgggccagcgcggccgaccggctgttgaggaaataggtgctgccgcgctcgcgcatgtaagcgtcctggatgtcgcggaagtcgatccagacgtggctgtactggtggccgaacagcgggccgaaggacaggtattcctggccctggtagacgccccagtcgttgtcgtaggtacgcgtccacaccgtccacgcgtccgggctgaccgggtgcgtcggcgagcccagggcgaggatgtacaccatcatcgcctcgttgtagcccatccagtcgtggtcgatgaaaccgctctccgggaaccagcccatcgagatcagcggtgcacgctgctgcagccacggccagtcgaccttcttgtacaacgtatcggcgatctggcggatttccttctcgcgcggatcatcaccgtcgtagtacgactgcgcgaacagcacgcccatcatcagcagcgcggtatccaccgatgacagctcgacccagctgtcgtagcgacggccttcctgcatgtccaggaagtggtagtagaagcccttgtaaccggccttgccggtgcgctgcgggcccatcggcacgtcgcggaagaacttcagcgtggtcagcgtgcggtcgatcgcctggttgcggctgacccagccgttctcgatgccgatcggataggcggtcagcgcgaagccgaccgaggcgatgctggcgaacggccgcgacgggtagcggtccggggtcagcccgttgacctcgttggtggtatcccagaagaactggaaggtgcggcgctcgatgtcatcgaacagcggcggcagctcaggcttcatgggccgaggcggtgcatcggcctcgatcaggatcaccggcgggcgcggtttggcaggttcctgctgggccggctggcaggcggccacggccaggctcagcgctgcggcggacaacagatggcgtgcctgcatggcgcggttcctccggtggtctgatcgatgggaaagcataccgtccaatgatctgaaatcgtttacaaggtgtgtgcttaaaaaaccacgaaaaacgtggcctgacaccgcgatcattgcccacgccgctgccccctggccggcagcggcgtgggcaatggaccggcacggggccggccattgccgttttcaccgatgccgccagcgagccggcggcatcgggtcatgcatcaccgcccgggcttagaagcggaagcccacttcggccttgacctggcgcggagtaccgatgatgtcgccggtctcgttgtagctcaccagcagcttgccgtcgctcttcacgtagttcaggttggagaagttgtcgaagttgagcacgttgatgatgtcgatacgcgcatacaactcggtatcgccggccagcttgaaggtcttggtcgcctgcaggtcaagcgaccggtagccgaagatcttgccgccgagcaggaagcggccgttgccccccgggtagccggcggccggggtcggcaggcagttcgggttgccggcctgtgccacgcaggaccagtcgttgcccgccaccggggtggccaaggtcagcttgccaccgaaggtgatgccccagaagccatcgtaggagcccgtgaccaccagacggtggcgcggcgcgccgttggacttgatgtatgggtattcgccgatggtgccgcgatcgaacgagtagtgctcgtcgatgttgcggttgtggcgcgcagtggtccaggtataggcgatcgaggtaccccagccactttccttggtgtacggcttctgcgccgacaggaggatctgggtagcgcgggtcttgatgccctgctggccaatgatcaggctgccgaagccggggatgttgcaaccccacggttggccgtaggttggcttttcggcaccacacagcatctggttgtcgaagaagttgccgttgcggaagcgattgcccagggtgtaggcgaagccatcataggtcagcgtgcgcgagatggtggcgtcggtcagccactccccgatctggttgctcatgcccaggctgaactggtccgcgtagggcaccttcaagttgttgttgagcaggtccacttccaggccttcgttgctggtactgcccagcagggcctgcacgttgccgatgccattgagcaggttcgggttccaatcgaagcacgggttctgcccgtacaggcaggctccgctgcgcgggtcgcggaagtacacggtcggctgcggcagggccagcttggtggtttccaacgccaggtagtcgaaaagatcacggtcgtaggaacgaccggcgccaccatggatcacatgctgctcgtcggcattgatgtcatacgagaagcccagccgcggctgccaggcatccttgaatgccttgcggttgtggccgttgctgatgtagtcgttgatgttcaggccgctcaacgcgagcgtctgcgcgtagctctgcccggccgggccatgcggatcctgcgcattgagcgcgctgaccacttccggcggggtcacgaagtccaggtaggtcgggttcttctcgtagtcccaacgcaggccaaggttcaactgcaggtggtcgttgacctgccaatcgtcctgaatgaacaagccaatctgcgtggtcttcgagcgtacttccggcaacacgccactgacaccagtaatcggcttggtgaactgcgccttgtacggcgtatcaatgccaaattccgggttgcccacggtgtagtagaactgcgggttgatctgctgcgcgtcggaggcgtacagattgatcttcttgtacttggcgcccatcttgatggtgtggtcgccagcccactccaagccgtccagggtcaggttgtcttcgatcgaccagcccttctggcccttcacctgcgaggcgaaggcgctggcaccaccgatttccacaatggtgcgttcctgcggggtgttgccgtcaatgtcacggccgtccggcgcggtgtacacgtagccgttgcccagggtcagcggcagcgggttgttgaacgacttctcgtgggtgaccatcagctcgttgtagaagcgctcaccgctgtgattccagcgcagcgcgaaacgacggtctgtgttgtcagtgaccttgccatgctccttggaggtctggtcactgaactgctgctgattctcgtcacgatcctggactgtgaactcgatgcggtcgttgtcggtcggctcgacgtcgatcttggcgaagatcaggtcctgcttgaacggctggctggccgggcccaggccggcggcggccgccgccggcagctgcgaggcagcactggtgaccgcgccattcggggcaatggtcactggcagatcgaaacgcttggcttcgtaggtcacgaagaagtgggccttgtccttgatgatcgggccgcccagcgcgaagccgtattccttctccgccgattcttccttgctctttcccggctggcgttcggccggggtcatcgcacgcatactgtcgttggtgtaacgatagaaggtctcgcccttgaactcgtttgtacccgacttggtcgcagcggtgatcgcggcgctggacacctggccgtactcggccttgtagttgccgctgatgaccttgtattcaccgatggccagctgcgggaacgggttgcctgcgctgccggactggccggccacgccgccgcccttgacgtagctcttctggcccacaccgtcaatgtacacgttggtgccgtcggcgttggtcgcaccgccgcgcagcgaggtgttgcccttggcgtcacgggtgaagatcatgcccggcaccgcgtcggcgaactccaggaagttgcgcgacacctgcggggtggtctggatctgctgcaggctgacggtcttgccgacttcggaggtgcgcacttcctgcagcagggtcggcgcgacgacgttgacggtgtccaggttggtggccgcggtcgaaccgggggtgctgctggcggcaccggcaaagttcagcgtcgcggtcgaggccacggtgacggtgaccttctgggtctggccgttggcaaccacgtcataggtacccgggtccaggcccatcagcgagtagctgccgtcggcgcggatggtgccacggcggacggtaccggtggccacgttggtggcggtcacttcggcacctgcctgggcgccggcaacctggccgcgcaggctggcgttggccgactgcgccatgacgttgggggcggcagccagcatcaggcagctgaccagtgcggtgctcagcagccggcgcgccggcatgcggaaggtggtatgcatcatcaactcaatctccgggtggcggtaaccgcttgcgcggtccctgcgatcagtcaaaaaaagaaggaacgcctctggcttcaatggccggatggcggagtggtggaatcgcgaactatcaagcggggaaccagggtctgcttgtcccctgtcccatccgtggaggtgccgtccatcaactgcatcagacgcgtcatggcccggtcgccgagctcggcgatgctgacctgcatggtggtcagcgacgggtggacgaaacgcgccagtggaatgtcatcgaaacctgccagggcaacatcggccggcacacggacaccagcctgcgtgaacgcatacaggcagcccagggccatcatgtcgttggcggcgaacacggcatcgggcagcgctccggctgccagcaactcctgaccggcgcgatggccggaagcttcgtcgaaatcaccgggcagctcgatgccttcggcgccactgccaaacgccaccagcgcgtcacggaagccgcgcaggcgctcgcgcgcgtcgaagttgaggtccgggccagaaatgaaggcaatgcggcggtggccggcgtccagcaggtggcgggtcatcgccatcgcaccggcgtggtcgtcgatgctcagcaccggatggtcctgcccgggcagataggtgttgatcaacaccgtcggcagcgactgcggcagattgtcggtcaggaagcccgggctctcggcatagggcgagagcaccagcaggccgtcgacgcggccgcgcatggcacgcagggcggcgccctgctgttcctggtcgccgtggtagctggacaccagcaggtgctggcggcggttgcgggccacgccgtcgatgccgcgcatcagttcggagaagaattcgccgtacaggtcaggcagcaccacgcccaccgtattggtgcggcggctgctcaggctgcgcgcggcggcatgcggggtgtaacgcagccgtgcggccacctccagcacaagctggcggaccggttcggcgacattttcatgcccgttgagcgcgcgggaaaccgtggccacggagacccgggcttcgcgtgcgacgtctttgattgtgatagctgccttgttcacgaagccgccctccacggcttggacctaccagcattggcgcggaatgtaagcgtttccatctgggcttgtaaacagtccgttaggcgaatgtcccgaaatggacatgaaaacctgtccgtggccaggcccttgcggacccgccaggacagtgcgggacaagggctcagccctgttctgacggggtatgtgcgcggatggacagcgcgtggatatcggtgtccatcatcgaccccagcgcggcatagaccgcgcgatgccgggccaacggagccagtccggcgaagcgttcactcaccacatggacgttgaaatggccgcgcccgtcgcgcgcgccggcatggccggcatggcgatggctgtcatcctcgatctcgagcacgctgggtgccagcgcctgctgcagcgcatcacggatccgctcgatccgttccgcgttcacggcaggaccttgcggaacgggcgtacctgcacgcgggtgtagacgccggcagccacgtacgggtcggcatcggcccaggcctgggcctgcggcaacgactcgaactgcgcgatcaccaccgagccgctgaaaccggccgggcccgggtcttcactgtccaccgccgggcacgggccggccagcagcaggcgtccctcgtcgcgcagcgcgtgcagccgcgccaggtgttccggccgcgcctgcagccgctgcgccagcacatcctggccgtcatacccttcgatcacataccacaccggcatttcctcgcttgcgttgtcgggtccgcagattctagccaatgcagcccccgccccggtccggctggacactggcgcggcaaaggcttaccctagactccattgcacgtggctggatgcagcggcccgtcggtttttgcggccaacgcagcccccgacgaccgtcccgctgcttcaaaccggaccacccggccgggccacgtagacgacctccccgtagttctgtcgctgccgtttaccgcggcgcgtcccgctgtttgatatgtgtggaatcgcgccgatcccggcgtgtctggcgccttggggctccgtggcgttggcccggcgaacccggtgccgcgactggtccgttgcaatcctgatctccattagatgacttccgaactcgcgctcgacgcgaacccgccaacccggccgcccgccccccagcagcaggaaatgccgctggccgtggtgcatgggcaaccggtcctgcagattccgcaggacctgtacatcccgccggacgcgctggaagtcatcctggatgcctttgaaggcccgctggacctgctgctgtacctgatccgccgccagaacctggatgtactggacattcccgttgccgagatcacccggcagtacgtggagtacatcaccgtgatgcgcgagctgcgcttcgagctggcggccgaatacctggtgatggccgcgatcctggccgaggtgaagtcgcggatgctgctgccgcgcccggtcagcgaggaaggcgatgaagccgacccgcgcgccgaactggtgcgccggctgcaggagtacgaacgcttcaagcaggccgccgagaacatcgacgccctgccccgccaggaccgcgataccaccgtggcacatgccttcatgcccgaacgtgccacggtgaagctgccgccgccggtggacctgaaggaaatgctgctggccctgcacgacgtgctcaagcgcgccgagctgttcagcggccacgccatcaagcgtgaggcactgagcgtgcggcaacgcatgggcgaagtgctgggacgcctggaagatggcaagttctatcgttttgaagggctgttcaccgccgaagaaggcaagctgggcgtgctggtcacgttcctggcggtgctggagctggccaaggaacagctgctggacatcgtccaggaagaaccgctggcgccgatctacgtgaagtcgctggcggccggcaacaccaatgccccgctgcagttcagcagcgagttcgacgacaacgacgacgacgccaatgcagacgagtgagcgctgactgccgatggatcaatcgctgatcaaccgcattgtcgagggtgccctgctggcttccagccagccgctcaccctggcccagctgaaggacctgttcccggaagaggaaccggcaccgccgggcagcatcgaacgtgcgctggaacgcctgcgcgaggcctgcgaaggccgcggcgtggaactggtcgaggtcgcctccggcttccgctaccaggtcaccggcgaagtgcatggctggatcagccggctgtggaccgaacgcaagacccgctacacccgtgccaccctggaaaccctggcgctgatcgcctaccggcagccgatcacccgcggcgagatcgaacaggtgcgcggcgtggcggtcagcagcaacatcatccaggcgctggaagaacgcgagtggatccgcgtggtcggccaccgcgacgtgcccggcaaaccggcgctgttcggcaccaccaagggcttcctggactacttcgggctgaagcggctggacgaactgccgccgctgtcggagctgaaggacctgggcgagctggaaccgcagcttgccctggaccgcgatgcgccggccgtcgccggtgccgagggtccggacatctcggccggcgccgatggcgctgccgcgaacgatgatgccagcctggccggcagtgacacccccgattccgccgatgcagcccctgcgtcggccaccgatgagcaagcaccttcgcccctcgatgatgggcaccccgattccgcgccgggcgagcgcgcggtgcccctgaacgaacgcgaagacaacgccgtcgcgatgacgaccgtggctgttgaccaagccgattccgaaccagaggccgacctcgaaaccgtcggccggagcaaaactgatgagtgacaccccccgtaacaagctctcgctgaagcgcgaagccacctccgaacagttcaagctggaagaacgcctgcacaaggtgctcgcacaggccggcctcggctcgcgccgcgcgctggaacagcgcatcgccgaaggcctggtcaaggtcaacggtgaagtcgcgcagaccggcatgtcggtcaagagcggcgacaagatcgaactggatggccgcggcttcgtcgccaccgccctggccgagccgtcgcgcgtgctggtctacaacaagccggaaggcgaagtgaccacccgcgatgatccggaaggccgcccgaccgtgttcgagtcgctgccgccgctgaagggcgcgcgctggatcgccatcggccgcctggacatcaacaccaccggcctgctgctggccaccaccgacggtgagctggccaacgccatgatgcacccgtcgttcgaggtcgagcgcgagtacgtggtgcgcgtgcgtgcgccggaaggcgaggaaaaggtctctgacgccatcgtcgaccgcctcacccgtggcgtcgcgctggaagacggcccagccaagttcgatgagatcgaacgcatcggcggcaccgattcgcacgactggttccgcgtcgtggtgaaggaaggccgcaaccgcgaagtgcgccggctgtgggagtcgcagggctgccaggtcagccgcctgaagcgcacccgctatggcaaggtgagcctgccgcgcgaactggcccgtggccattcggtggaactgggcaccacgcaggttgaagccctgcgcgcccagctgaagctggaagaaggcgcaccgtcggcactgacgctgcagccggtgatcggccagcgccgcgcggcgaagaccaccgtgcgcgtgcgcgaaggtggccgtggcaacgcctacgtcaacggccacaacaccgccgacgaaggccgcgagctgcgtcgtttcgacaacgtccgcgaagaccgcggccgtggtcgcggcggcaagggtggcggcttcaagggcggcctgacggtcagcggtgaagcggcagccaagcagtcgcagaagccgttcaagcagcgcgcccagaagaatgatcgttcgctgccggaaggcaatccggccgcgttccgcacctggtacgtgccggatggcgtgagcaccggcccgagcggccatcgcaacgccggcccgggcgcacgcggccccggtgcccgtggtccgggtgcaggcggccagggccgtccgtacggcaagccgaagggcccgggcgcaggcgccggtggcggccagggccgtggcggtttcggcggcgaaggccgtggcggcgcaggcggccagggtcgtccggccggtggcggcaaccgctcgcagggccagggcaacaagcacccgtacggccatccgggcaacgccccgagcttcccgtccgaccacgccaccccgggcttcaacccgtatggcagcccgaagccggcacacggcgcccgtccgggcggtcgcggtccgggcggtggcaaccaccgtggcccgggtggtaaccgtggccccggtggtccgggtggcaaccgaggcccgggcggccccggtggcaaccgcggtcccggcggcccgcgccgcagcggcccgcgcggcggctgatcggcagccacgttgaaatgcagaaccccggctccggccggggtttttctttgaaaaggggacggaggggattaagtcgctttcgccacgccgtgcgtcgaagggcgaaagcgacttaatcccctccgtccccttttgcgtggcgctggaaagcggcgggcgtggtaccggtcatgctgcggaaaaaggcgatgaacggactctcggcggaaaaaccagtgtcctgcgcaacgtgcccgatgcgatggccaagcagcagcagctccatggcgcgcatcaggcgccattgctggcgccaggcctggtagcccatgccggtctcgcgttgcatcaaccggccgaccgtgcgcacgctcaggcccgcacgcgcagcgagctcacccagttcaggcggcagctgctcggccagcggcaggcagcgcgcgatgcgtggatcgcgtggcagcggcaggtccatcggcgccaccggtgcggcgccgatctccagcacgcacaacgccaattgatggtgcgcgcgtggcgcccgccagtcatggtcgaacggcgcctgcgcgatcggttccagcaatgcctgcagcaggggaccgacgccgatgatcgccggctgctgcggcagccgtgccgacaacgtggcatcgaaatacagcgagcggtagtccacggcctggcgcatctgtgcgcgatggcgcaggccgccgggaatccatgccgcgcgcgagggcggcagcaggctgatgcggtcgccgaaggtcagccgcgtgcagccccgccgggtgtacagcaactgcgcgcgcgcgtgctggtgccaacccgaatcatgatcggccagcgacgacgcgatgcccagcaccggtgcgctccaggcatccgcatcgaagtgcgcatccggttgcagccacgccatgtccgatttcatccatttcctggccggaccgacagagtgcgccactccgccggccaccacaatacgcggccctgtttgcggagcacccgcatgtcgcgtcgcctgttgttgctcaccatcgcgctgctgatgttcccccagttggcgcagaccctgtacagcccggccctggccgacctcgccgggcgcttcgcactgccccccggcgccgccagccaggccatgagcctgtacctgttcggttttgccgccggtgtcctgctatgggggcggctggccgaccatgtcggtcgtcgccctgccctgctctgcggcctggccgtgttcgtactggccgcctgcggcggcctgctggccagcacgttcggccaggtcctgctggcgcaggcactggccgcactgggtgcggcggcggcctcggtggtaacccagaccgtactgcgcgaccacctgaagggtccggcgttggcgcaggcgttctcgtggatcggcatggcgctggccttgagcccggcgatcgggctggcactgggtgtgctgctggtggacagccatggctatgccggcgtgcaggccggcctgctgctgatggtcagcctgctgatgctcggatgcgcaacgggcctgcgcgagagccgccctgcggaagtcgcgcacacccccatgctgccactgttgtggcaactgctgcgtgatcgctggatgtggtcacaggcgctgctggtgatggcgttcaacgtggcgatgtacagctggtacgcgctgggcccgttcgtgttcgaacgcctgcactggccgctggcctggttcggtgccagcggcgcgctgctggcgctcggctcggcgctgggtgcatggggcaatgctcgcctgctgcgcgcaggcgttgcctccgccacgcgcatccggctcgccgcagggctggtgctggccggtgggctgttggctgccttgctgcacaatcagccggcactggtcgcggcgatggtaccggtggtggccgggttcggcctggccattcccaatgtgctgggccaggccctccgcggatacccgcactgcctgggcagcgccggcgccctgttcggcctgctctactacctgttgatcggcgtggcgatggccgtggtcggcgcactgcaactgctggcgccgacactcatcgtgtgcggcgtgcttgccctgtggctgcagcggccggcacggctcagcgccggctgatggtgaaggcggcgccgtccacgcccagatcccagcccttgccggtgccggacagggccagcgagatgtcgcccttggtcatcacctgcgcgttgctggacttcacggcacccgcatgcgcgccaaccgaggcgtaggtgcccagcagctcgttgacgctgacggcgccggtgaagctgccacggccattggtgatcttcgacttgcccacggtcaggccgccgcccttcacttcgatacgcaccggcaggctggtgccgttgctgcagctgaccgtgccgttgccggaagcggtcttgtagatcagtgaccagccggacaggttgtagcgcagctggcaatcgaggttgccggcggcgtgcgcggccggggccagcgtagcagcggacagggccagcagcagggcgaagggcttgttcatggcaggacttccagttcggtcggactgccggcgaatctagcagcgcgcgcgtgcacgctggatgcaggcgcgcgcgctgcgtggcaggcattcagccgccgtcgtgctgtttcaggcctgctcgtccaggtggaaggcatcagcatcgagcatcgccgggaaacgcgcgcgatgtgcagccagtgcttcggccgaaatggtggtggtcaccacctgttcgcgttcgcggatctccacctgcggctggccgaggaagtcgatcaccgcgctgtcgccggcgtagtgcagctggttgccgtccacgccgacgcggttcaccgcggccacaaagcacaggttctcgatcgcccgcgcacgcagcagggtcttccatgcataggcgcgcgccgacggccagttggcgacgaagatctgcaggtcgaaatccagctgctgcgggcgttcgacgttgtagcggttgcggcagaacaccgggaagcgcaggtcgtagcagacctgcggattgatccgccagcccttccattccacgctcaggcgctcacggccggcggcatagcgctcgtgctcaccgccgtaacggaacaggtggcgcttgtcgtagtactgcaggccgccctctggcgttgcgaacagcaggcggttgtagacgccgttgccctcgcgcagctgcacgctgccgatcactgccgcgttcaagaccctggcctgttcgcgcacccaggccacggtcggcccgtccatgccttcggcctgggcgatggcgtcgttggagaagccactggtgaaggtctccggcaggatcaccaggtcggtactgccggccagcggtgccagcaacgcaccgtagtaggcgcggttgccggccgggtcatgccagcgggtgtcgccctggacgagggaaatgcgcaggtcctgcatgtccgtgtctccgctcacagcaggcgcaggcgttcgatcgccgcgtccatggtcgcttcgttcttggcaaagcacaggcgcaccaggcgctggccggccggcggagtctcatagaacggcgacagcggaatggcggtgacgcccttctcgatggtcagccacttcacgaactcatggtccggcaggtcgctgatcgccgaatagtcgaccagctggaagtagccgcccggcaccggcagcgccttcaggcgggtaccggccagctgctcgcggaagcggtcgcgcttggcctggtagaacgcgcccagttccaggtggtgttcgggttcgtcgcggatcatcgcggcgaagccatgctgcgccgggccgaagctggtgaaggtgttgtactggtgcaccttgcggaactcggcggtcagcgccggcggggcgatcgcatagccgatcttccagccggtgcagtggtaggtcttgccgaagctggagatgacgaacgcgcgctcgcgcagttccgggtagcgcagcgccgattcatggcgacggccgtcgtagatgatgtgttcgtacacctcatcggagatcaggtagatctgcgtgccgcgcagcagttcggccagcgcctgcatgtcctgcgccgacagcatcgcgccggacggattgtgcggggtgttgacgatcagcatgcgggtgcgcggggtgatcgctgcgcgcacgcggtcccaatcgaccgcgaacgtctgcggatccagcgacacatgtacggccctggcaccggccaggtcgatcgccggttcgtagcagtcatacgccgggtccagcacgatcacttcctcgccggcacgcaccacggcgtggatggcgttgaagatggcctcggtgccaccgctggtgacggtgatctcgctgtccgcatcgacctgcgcgccgtagcagtccagcaccttctgtgcgatggcctggcgcagcggcgccacgccggtcatcggcgggtactggttcagcccggcggccatcgccctggcggtctcgtcgatcaggcgctgcggcgccgaaaagtccgggaaaccctggcccaggttgaccgcgccgtgttcggcggcgagctgggacatcacggtgaagatcgtggtaccgaccttgggcagcttggtggtgggttgcatcggcatgggctgtgggggaacaagggatccgagtttacgcaatccgcgcgtcggtagcgccggccgccggccggcaacctcggctggcaggtggcgaaattaccggccagcggccggcactgccatcggcattcaccgctacaattgccgccgcactccggcatgaagacctttgccccttgaacacccctgcattgctggctgccagcggcctgagcttctcccgcaatgacgagccggtgttcggcccgctggacttccatgtggacgccggcgaagccctgctggtgcagggcggcaatggcgccggcaagaccaccctgctgcgcgtgctggccggcctggcccggcccggtgccggccaggtgcggatcgacggcaagccggccagcaatgccgagcgcgcgcgctatgtcgcctacctcagccacctgccagcgctgaaaccggacctccgcacgctggaaaacctgcatttcctgtgcggcctgcacggacggcgtgcgcggcagatgcccggcaacgcgctggccatcgtcggcctggccggttatgaggacaccctggtacggcatctgtcggccggacagaagcggcggctggcactggcgcgcatctggctgtcgccggcaccgttgtggctgctggacgaaccctatgccaacctcgacctggagggcatcaccctggtcaaccggatgatttcggcgcacctgcgcgccggtggcgctgcgctggtcaccacccacggtgcctatgccgcaccgccggtgcgcacccgccagctcgacctcggcggtgccgcgtgatcgcgccgggcaccgaaccgggcctgtggcagaccgcaggcgccctgctcaggcgcgacctgcgcctgctctggcgccgccgcggcgatgcgctgcaaccgctgctgttcgcggtgctggtggtggtgctgttcgccctggcccagggccgcgaaccacagctgttggccgccaccgccggtgcagtgctgtggctggccgtgctgctggccggacagctgtcgctggattcgctgttccgctccgacgccgaggatggctcgctggaacaatggctgctggcgccggtgccgctggcctggctggtgctggtgcgcgtgctgctgcattgggccaccactgcgctgccgctgatcgtggtcagcccgctgctggccgaaatgctgcatctgccgcatgaccagctgccgatgttgctggcatcgttgctgctgggcacgccgttgctgagcctgatcggtggcgtggtcgccgcactgaccgtaggcatccgacgctctggtattctcgtggcgctgctgtcgttgccgctgtacgtgccggtgctggtgttcggcgcaggcagcctggcggcagccggacgcggacaggatccggtcggtgcgctgctgatgctgggcgccggcctgctggtcgcgctggtgctggcgccgctggccactgccgctgcaatacgtatttctctgagttgaccgagctgagagccaatccacccctgctggatagccgccacgcatgaatccgattgtccgctggttccaccaactcggttcgccccccacgttcgaccgtttcgctgcccgctggtcgcgggtgttctacctcgcggcggtgccggtgctgctggtcggcatgtggcaggcgctgctggtggtgccaccggaagccaagcagctggacagcttccgcatcctctacatccacgtacccagtgcctggatgagcctgttcgtcttcgcgctgatggcgttgtatgcggccatcgcgctggtctggcggatcaaggtctgcgagatcctggccatggcctgcgcgccgatgggtgccggcttcaccctgatcaccctgttgaccggcagcatctggggcaagggcacctggggcacctggtgggactgggacccgcgcatgaccagcgaactggtactgctgttcctgtacctgggcgtgatcggcctgtaccacgccatcgaggaccgccgcagcgccgcgcgcgccgctggcctgctggccattgtcggtgtcagcctgctgccggtgatccgctattcggtggactggtggggcggcctgcaccagcgccagtcgatcagcgtattcggtgaatcggcgatcagcagcgcgatgatcgcgccgttgtggtggatggtgatcggcaccaagttctggttcgccggttcggtgctggccaaggcacgcgccgacaatctcgaccgcgaggccggcaaggcctgggtcggcggccgtgtcgatgccggactcccggcccgggaggcccagccatgacccacctgccctatgtgatcggtgcctacgcggtgttcgtgctggtgctcggcgccgatgccatcggttcgtggctgcgcctgcgcgtggcgcgccggctggcactggcccgccagcagcgccagcagacccgcgccggcaggcaggacgcagcggcgccgttgtcgacggagctggaacgatgaccccggtacagcgccgccgcctggtgtgggtgttgctggccctgctcgcctccggcctggccaccgcactggtggcgatggcactggagcgcaacatcgcctacctgtacacgccctcggaagtgctgcgcggcgatgtcgatgcacagtcgcgcttccgcctcggtggcatggtggtgaaaggttccttcaaccgaccggtcggctcgctggaggcgcgcttcgaggtgaccgacggcgacgcgcagctggcggtgaccacgtcgcggatcctgccggacatgttcgccgaaggcacggcggtggtcgccagcggccgcctgcaggacggcaccttcgtcgccgacgaggtgctggccaagcacgatgagaagtacgtgccgaaggaagtggccgacaagatgggcgacgcccatcgcaagcacgacgtgccggtgacggcacccgaggtgcgctgagtgctgcccgaactgggtcagatcctgctgctgtgcgcgttgctggcctcgctgctgcaggccggcctgccgctggtcggcgcgcagcgcaacaatacggcgtggatggcggtggcacgacctgccgcgttcgcgcagctgctgctggtcgccggcgcgttcgtggcactgaccgccgcgttcgtgcagcaggacttctcggtgcgctacgtggccgagaactccaattcgctgctgccgatggtctaccgctactcggcggtctggggcgcgcacgagggctcgctgctgatgtgggcgctggtgctggcgctgtggaccggcgcggtggcgctgttctcgcggcacttgcccgcaccggtgcaggcgcgcgtgctggcggtgatgggcgtggtcagcgtcggcttcctcgccttcctgatcttcacctccaacccgttcctgcgcctgaacccggcaccgctggaaggccgcgacctcaatccgctgctgcaggacccggggctgatcatccatccgcccatgctgtacctgggctatgtcggctttgcggtgccgttcgccttcgcggttgccgcactgctggaaggccgcgtcgacgcacgctggctgcgctggacgcggccatggaccaacgtcgcctggggctttttgaccctgggcatcgcgctgggcagctggtgggcctattacgagctaggctggggcggctggtggttctgggacccggtggagaacgccagcttcatgccatggctggtcggtgcggcattgatccattcgcaggccgtcactgaaaagcgcggcaccttcggcagctggaccctgctgttggcgatcgccgccttcgcgctgtcgctgctgggcacgttcctggtgcgctccggcgtactgaccagcgtgcactccttcgctgccgatccttcgcgcggcctgttcatcctggtcttcctgtcggtgctggtcggtggcagcctgttgctgtacgcgctgcgtgccagccagctgagcgtggatgccgaggacccacgccgtggcttcaccgccacctcgcgcgagaccctgctgctggccaacaacctgctgctggccaccgcctgtgcgatggtactgctcggcacgctgtacccgctgctggccgatgcgctgtcgctgggcaagatctcggtcggcccgccctacttcggcagcctgttcctgctgctgatggcgccgatgatcctgctgctgccgttcggcccgctggtgaaatggcagcgtgaccagccctcgcgcgccttcgcgctgctggcaccgtggctgggcctggcgctgctgctgggcgcgctggcctggtggcaggcgccgcagaacgggtggaaggccggcatcggcgtggccgctgcggcctgggtcgcgctcggcaccgcacgcttcgtctggcagcgcctgcgcggcaatggccgcttcaccgccgaaatgctcggcatgatcgtcgcccacgccggcattgccgtgttcctggccggcgcgctgctggtggaggcgctgaacgtgcagcgcgaagtggcgctggcaccaggccagcagctggtggtcggtcgccacgaagtgcgcttcgaaggcgtggaccatcgcgaaggccccaacttcatcgccgaccgcggccacctgcgcgtgttccgcgacggccgcgagctggccctgctgcacccggagaagcgccagtacgccagcggcggccaggtgatgaccgaggccggcatcgatgcacgcttcaatggtgacgtctacgtggcattgggcgagccgctgggcaacaatgcatgggcggtccgggtgcacatcaagccgtacgtgcgctggatctggctgggcgcgctgttgatggccctgggcggattcatcaccgccgccgatcgccgtttccgtcgtccgtaggagttcccatgtccgagtcccccaccccgcgtccctcccgcccgctgccgccggtagccatcgtgatcggcgtgctgttcttcttcggcctgctcgggctgatgatctacggggtgatgaaatcaggcgatccgcagcgcgacgtactgccgtcggcactgatcgacaaaccggcgccggcattcgcgctgccggtgctgcacgacccggaaatgatcgtgcacagcgacgacctgcgcggcgcgccctacctgctgaacgtgtggggcagctggtgcgcggcctgccgcgaagaacacccggtgctgacccgcttcgcggaaagcaagcgtgtgcgcgtgatcggctacaactggaaggacgacccgaccgacgcgttgcactggctggaacagctgggcaacccgttcatggtcgtgctcagcgatgtcgagggccgtaccgcgatcgactggggcgtgaccgccgcaccggaaaccttccttgtcgatggcagcggcatcgtgcgctggaagtacagcggtgcgatgacccagcgcgtggtcgacgagaagctgatcccggcgctgcagaagatcgagaaggcccagggcagtgccggcaacaccctgcatacggcgccctgaacccatgcgctggctgctggcgttgctgcttctgacgctgccgctggccgcgctggcccagcagccgctgcacgatccgcagtcgctgcagttccgcgatgacgccgaggaacgccgcttccatgacctggccgcgcagctgcgctgcgtgcagtgccagaaccagtcgctggccgattccaacgcgcagatcgcccaggacctgcgccgcgaggtgctgcagctgatgcagcagggccacgacgacgcacagatcaagcagttcctggtcgcccgctacggtgagttcgtgctctatcaaccaccgttgcagccgggcacctggctgctgtggggtggccccctgctggtgctcggcgccggtgcactggtggtgctgggcatcgtccgccgacgtggacgcaccgtcggcgcggcgccggccggcaaggccgatgaaggagacgaatggtgaaccattggctgccggtgctggccggtctggttgctgcgctgatggcagcactggtgctgtggccgttgcgccaccacggccgtcgcggtttcgtggtcggcgtgttcgcactgggcgtggccggtgcctgcctgtacttgctgatcggtgatccgcgtgcagcacaggtacagccgacgccgtcggcagcctccctgcgcgatggcgtgcaggccctgcaggacgcactggagcgcgacccgcagcgggctgatggctgggcgctgctgggccggtcgcaggccgaactgggcaacgccgcagccgcggcggatgccttcgcgagggccgccgcattggcaccggatgatccgggcgtgctggtggaagccgcgcaggcgcgcgcgcaggctgatgccggcaagcagttcgatgacaccgcaatggcctggttgcagcaggcgcgcgcacaggctcccgatgccgagcgcgccagctggctgctgggcatcgccctgcgccagcgcggaaagaacgccgaggccgcggatgtgtggagcggcctgctgccacgactggagccgggtgccgcgcaggcgctgcaggcacagatcgccctcgcgcgcgaggccgctggccaggcgcccgatgctggcgctgcggcgccaccggcgctgctgcaggtgcgcgtgcagctgccggcactgaagaacgccgagtggccagccagcacccaggtgttcgtgctggcccgtgccgtcggcggcccgccgatgccggtggccgctcgcaagctgccgctgagcggattcccggacacggtcgggctgggcgacggtgacagcccgatgccgaccgcaccgctgtcggcccatcgcgaagtggaagtggtggcacgcatctcgcgcagcggcagcgccaaccgcagcgaggacgacctgcagagcgttccggtgaaggtaagcctgccccacgacggtgttgtggagctgcgcttcccttgacctgtagagccacgccatgcgtggatgcgacggtccggtccgcgtccatccatccatggaaaccagcgtgtcgccagctccacatgcggccccgctagaatgcgtgcatgaccgaattcatcccgcccggcacccgcttccacgccctgccctcgccgttcccgttcaagcgcggtggcgccctgcatggcgcacgcgtggcctacgagacctggggaacgctggccgctgacgccagcaatgcgatcctgatcgtgaccggcctgtcgccggatgcgcatgcggcggccaacgaggccaatccggcgccgggctggtgggaagcgatggttggccccggcaaacccatcgatacccgccgctggttcgtggtctgcgtgaattcgctgggcagctgcaagggatcgaccggccccgcctcgatcaacccggccagcgctgagccctaccgcctggacttccccgagctgtcgatcgaagacggcgctcgcgccgcgatcgaagtcgtgcgtgcgctgggcatcgcgcagctggcctgcgtggtcggcaattccatgggcgggatgaccgcgctggccgtgctgatgctgcacccgggcatcgcgcgcagccacgtcaacatttccggcagtgcgcaggcgctgccgttctcgatcgcgatccgctcgctgcagcgcgaggcgatccgtctcgacccgcgctggaatggcggccactacgacgatgccgagtaccccgagtccggcatgcgcatggcgcgcaagctgggcgtgatcacctaccgctcggcactggaatgggatggccgcttcggccgcgtgcggctggattcggaccaggccgacgacgatccgttcgggctggaattccaggtggaaagctatctggaaggccacgcacggcgcttcgtgcgcttcttcgatcccaactgctacctgtacctgagccgctcgatggactggttcgacctggccgagtacgccgacggcgacgtgctggccgggctggcgaagatccgggtggagaaggcactggccatcggcgccaacaccgacatcctgttcccggtgcagcagcagcaacaggtcgccgacggcctgcgtgccggcggtgccgatgcgcgcttcatcgggctggaatcgccacagggccatgatgccttcctcgtcgatttcgagcgtttcggcccagccgtgcgcggcttcctcgacgcgctgtaagtggcgtggcggcgtaacctcgcgctggccgccttcggcgcgctgaccgccttgatgatcagcggtgtgctgccgttgtggctgggtggctggtgcctgctggccagtgcggtgtcgttcggcctctatggccatgacaagcgcgcggcgcagcgaaagcgatggcgcattcccgagcgcaccctgcagctgctggccttcgccggaggctggcccggcgcgctgctgggccaggcgctgttccgccacaagcatcgcaaagccgcattccagtgggtgttctggctgtgcgtgctggccaacgtggcctcgatcgcggtgatgctgcgcgagttctcccattgaccggcctgtagagccgagcccatgctcggctggcttgcttccggagccgagcatgggctcggctctacagtagatccacgccatgcgtggatgtgccgaccaaggtcggcatctaccgaagcacttcgcgctccaacaccccatcgcgcaaccggtactgcgcatcgaccacgccttcgggcaggtcgtcgtgggtgatcatcagcaggctgcgcccgtccagcaacccggaaaggtcctgcaacagcgcacgtgcggtatccacgtccaggccttcggtgggttcgtccagcagcaggatcggcgcattgcgcagcagcgcgcgcgccagtgccaaccgccgcgcctggccggccgacatcgtcgcaccgttctcgccgacccaggcctgcaggccaccgttgtgctcggcccagtcgcccaggcgcacgcgacgcaggaccgcccacaacgcggcatcacgggcgtcggaatcccccagccgcaggttctcggccacggtaccggcaaacaccggtgcgttctgcggaagccaggccagctggcggtgccactcggcctgggcgacgtcgcgcaggtcgcgtccgccataggtgattcgcccctgttgcggatcccacaaccgcagcagcaggctggacagcgtggtcttgccgctgccgctgtcgccacggatcgcgatgcgttctcccggcgccagggtcagctgcaggccggacaacaccggccgcgcggcacctggccactggaagtgcacgtcatcccaatgcacgcgcgccgcctggggtaccggctgcggcgtctgcggatcctccaccgtcggcggttgttcgacgatggcctgcaggcggtcagcagcaatgcgcccggactgcagcgactgccaggccaggcccatgccggcccaaagttcgatcagcgccacggtcaggaagacgaggcccgcggccatttccggcgcgatgtgctgctgttcggcggcgtgcagggccaacgccagcatcgccaccaggcccagccccgccaccaggccgtgcagggtcgaggccgcgatcaggcgccaacgccgacgacgatcacgcgaggccagctgcttggcggccacgcgtaccttcagctgccaagccgcatcggcatgcagcgcggccaggtcaccggccccctccagaccttcgaatgcagcggtgcgcaacgccgcgcggtgcgcggcacgatcggcctcttcgtcgtcatggccacgcacgcccagccacggcacgccgaaggcgatcagcagcgccagcaccgccagcagtaccgccgccgagggcaggatcagcgctgccgaggcaaccgccaccagcgacagcgcgcccagcgccaccagcggcccgatcgcacgcaccagcagcccatccacttcgccgatgtcccccagcagccgcgccagcagctcgccggtgcgcgtggcgcccaatcgtgccggcgccagtggcagcgcgcggcggaagaaccacacgcgcaggtcgcgggcaatgcgcagcgtggcatcgtggccgaccagcttttcgaagtagcgcgacacgatgcgcgccatggtcaggccacggatgccggccgagggtgagaagaaattgaagccctggccgaggccggccgcaccggccagcgcggccgccgtgaggaaaccaccggacaggcccagcagcgccgtgccggccagcatcgtggtccacagcagcagcagggtcagcaacaggcgcggccggtggcgcaggaatatcgcgcgcagcgaatcaggcgaacggctcatgcgcgcaccgcctgtgccggctcgaccaggcggccttccggcaacagcaggcaacgatcggcccaggcgatcaccgccgggctgtgggtggcgaccactacgctgcgcccgcgcgcatacgcggccaggctgcgcagcagcgccgcctcggtatcggcatcgaggaacgcggtgggttcgtccagcagcagcacctgcgggtcacgcagcagcaggcgggccaggccaatgcggcgggcttcaccaccggacaggccgaagccgcgttcgccgatcaccgtgtccagcccctgcggcaggcgctgggcaaactgcaggacctgcgaagcctcggccaccgcgcgcaggcgcgcatcgctggctgcgggatcggccaggcgcagattgtcggcgatgctgccatggaacaggtacggtcgctggctggcataggccacctgcacgccggggcgcagctgcagcttgccggcacgcggcggcaaccaaccggccagcgcctccagcagcgtgcttttgccggatccgctgggaccgaccagggccaggcgctggcccggctccagcagcaggtccagatcccgcagcacatcctgcggcgcccccaacgggcgcagtaccagtccttgcgcctgcagtggcggcaaggcggcctcggccggctccaccgccagcggcgcaacctcgttctcgatcaggccctgctcgtccggcagcgactgcagcaggcgctccacttcggcggcggcggccagtgcattggcgcgatcatggtagtgcgcagccagccgtcgcagcggcgcatagaactccggcgccagcagcaggcagaacaggcccgcacccagcgtcggcaccgctgcatgcagcgacatcatgcccagatagctcaggcccaggtacagcgccaccatcgccacgctcaccgaggcgaagaattccagcacggtggacgacaggaaggcgatgcgcagcaccttcagggtgcgcacgcgcacgccttcggcggcggcctcgatgccggccagttcggcttcgccgcggccatacaggcgcagcaggcccaggcccttgatgcggtcggcgaaatggccgctcatgcgcgccagctcgcccagctgcgcgcgcccggcggcttcagcaccccagcccaccagcatcatgaagaacggcaccagcggcgcggtgaacagcaggatcagcgccaccacccagtccacccaggcgacagcggccaggatcagcagcggcaccaccaccacttcggtgcgcaccggcaggaagccgctgtaatagctctcgatcgcatcaccgtgatgcagcatcagttcgcccagttcaccggtgcggcgctgccgcagccagagcgggccctggcccagcaggcgcgcgaacacgcgttcgcgcagtgccagccgggcggcgtcggccacgtcaccggcggcggcctgggtggcgctgcccagcagggtgcgcagcaccaggatcaccgccaatcccgccagcaccggcaggccagaggccagcggcacgcgctccaccagcacctgctgcaccagccaggcgatggcggcagcctgcccgatcaacagcgcgccggacaggctgatgcacagcgcggccaggcgctggcggccccgggcggagcgtgccaggtcggccagccaggccgtgcgcacacgccgctggcgggcggtttcagcttccggggacaggccgtcaggggtcgtttcggcagcgctcaagaggtcttcacgggcagcgggggagacacggcattgtaggcgcaggcaatagcccgcccctgcggccggcggtcgcagtcttcatcaggttggcatacgatcaaccggggcacctgttcatacattgatctggatcaaggctgtttgaagtagtcggtcacatcattcacgtcgtagaccacccttcccgccacctgcaacggcactatccaacgaggtagccaggccatgattgatcagacagtcgtagaactgtcgcggctgcaattcgcgctgaccgcgatgtaccacttcctattcgtaccgctcaccctcggcctgtccttcatggtggccatcatggagagcgtgtacgtgatgaccggcaaggagatctggcgcaggatgaccctgttctggggcgtcctgttcggcatcaacttcgccatgggcgttgccaccggcatcgtcatggaattccagttcggcatgaactggtcctactacagccactacgtgggtgacatcttcggtgcgccactggcgatcgaaggcctgatggcgttcttcctggaagcgaccttcgtcggcctgttcttcttcggctggaaccgcctgagcaaggtcaagcacctgatggtgacctggctgatggcgctggggaccaacctgtcggcgatctggatcctggtggccaatggctggatgcagaacccgaccggcgcggtgttcaacccggaaaccatgcgcatggaagtggtcgacttcatggcggtggtgttcaacccggtggcgcaggccaagttcgtgcacaccgtcagcgccggctacgtgaccggtgcggtgttcgtgatggcgatcagcgccctgttcctgctgcgcaacaagcacaaggacctggcccgtcgttcgtttgcggtggccgcggcgttcggcctgctgtcatcgctgtcggtggtcgtgctgggtgacgagagcggttacgccgccagcgaacaccagaagatgaagctggccgcgatcgaggcgatgtgggagaccgagcgtgcgccggccgacttcaccgccttcggcatccccaaccaggagactcaccagaacgactacgcggtgaagatcccctacctgatgggcctgatcgccacccgctcgttgaaccagccgattcccggcatcctggaactggtcgagcgcgccgaacaccgcgtgcgtggcggccagctggcctacggtgcattggaacgcctgcgcgccaacaagaacgacgttgaagcgcgcgagatgttcgaccgccactggcaggacctgggccacggcctgctgctcaagcgctatcgcgatgacatcctcaacgccaccccgcaggagatctcgcaggcggcgatggacacggtgccgcgcgtgatgccgttgttctggaccttccgcgtgatggccggcctgggcttctacctgatcgccttcttcgcactggccttctactactcgtgccgcaacaacttccaggacaagcgctggttcctcaagctggccctgtggacgctgccggcaccgtggatcgcgatcgagtgcggctggttcgtggccgagtatggtcgccagccgtgggcggtcgatggcgtgctgccgaccttctatgcggcgtcgggcctggccctgcatgaaatcgtgctgaccctggccggcttcactgccatctacaccgcgctgatcgtggtcgagatcaagctgatgctcaaggcgatccgcaagggtccggacgaggtgctgccgtcgctgcagtcgccccagccgcatgcttcccacaatgcctcggcgccggccgccggccaggcctgaggcaggagaaccaagatggatttcattcttctggactacaccacgctgcgcgtgatctggtggctgctgctcggcatcctgctgatcggtttcgccgtgatggatggtttcgacctgggcgtgggcaccctgctgcccttcgtcgcccgcaacgacgctgagcgccggctggtgatcaataccattggtccggtctgggaaggcaaccaggtgtggctgatcctgggcggcggcgcgatcttcgccgcctggccgccgctctacgcggtcagcttctccgggttctacctggcgatgttcgtgatcctgttcgccctgatcctgcgtccggtcggcttcaagttccgcagcaagatgcccagcgagcgctggcgcaacacctgggactgggcgctgttcatcggtggcttcataccggcgctgatcatgggcgtggcggtgggcaacgtggtgctgggcgtgccgttccacttcgatgacagcatgcgcatcttctacaccggctcgttcttcggcctgctgatgcccttcgcactgctggccggcctgctcagcgtgtcgatgctggtcgcccacggtgccgccatgctggtgctgaagaccgacggcccggtggccgagcgtgcggcccgcttcggcagcatcgccgcgatcatcgctttcgtgctctttgcggtcggcggcgcctgggtggccttcggcctgccgggttaccagatcacctcgcaggtggtcaccgacggcgccaccaatccgctgctgaagaccgccgaactcggcgccgccggtggctggatgcgcaactacagcacgatgccggccacgatcctggccccgctgctcggcctggccggcctgctcgccagtgcggtgctgctgcgtgcccgccgcggcggcctggccttcattgcctccggtgcggccatcgccggcatcatcctgaccgtcggcttcgccatcttcccgttcctgctgccgtcctcgagccagcccacctccagcctgaccgtgtgggatgcctcgtccagccacctgaccctgtggatcatgctgctggccacggcggtgttcctgccgatcatcctcgcctacaccacctgggtgtaccgcgtgctgaagggcaagaccaccaccgaagagatgggcaacaacccgaacgcgtattgattgcttgcacgtgtgccgaccaacggtcggcacctacccggaatgaaggagactgatcatgtggtatttcgcctggattctcggtgccggcctcgcctcgacggtggccatcctcaacggcatgtggttcgaagcccgcgagcagaaccgcatcgagaaagaaaatcgtcgctgagctgtaaaaaaaccttgccgccttggccttcacacggtatcttaggcggctccttcggggtgtagctcagtctggtagagcgctacgttcgggacgtagaggtcgcaggttcgaatcctgtctccccgaccacttcggtggtcgcattgaagcctggtgaagtcgtccaggcttttttgttccctgaagtggcactgcttcggcagtgtgaagaaaacagcattcaccccttgccgccatcggggtgaatcgctagaataggcggctcccttcggggtgtagctcagtctggtagagcgctacgttcgggacgtagaggtcgcaggttcgaatcctgtctccccgaccacttcggtggtcaccaagaagcctggaagacatcactgtcctccgggtttttttgtatcaggcacctgcccgcccgcatgacgggaccttgccggagcccgcacgtacaatggccgcgctgccggcccgccagcagcccctcccccacctgccgcttcggcgtagaccgatgccggcgctgcatgccattgccccggcgtgcgacacctgcaaggaccaccgatgagttcctccccttccgattcgccgtcgctgctgcacggccgcgtcctcgcattcgccgcgatcctgctggcagcgatcaacctgcgcaccgcggtcacctcgatcactccgctgctggacgtgctcggccagcagttcggtt
